(19) United States
(12) Patent Application Publication
(10) Pub. No.: US 2024/0124865 A1
(43) Pub. Date: Apr. 18, 2024

(54) ADAMTS13 VARIANT

(71) Applicant: The University of Manchester, Manchester Greater Manchester (GB)

(72) Inventors: Stuart McRae Allan, Manchester Greater Manchester (GB); Kieron South, Manchester Greater Manchester (GB)

(21) Appl. No.: 18/277,434

(22) PCT Filed: Feb. 17, 2022
(86) PCT No.: PCT/GB2022/050427

§ 371 Date: Aug. 16, 2023

(30) Foreign Application Priority Data
Feb. 17, 2021 (GB) 2102208.2

(51) Int. Cl. C12N 9/64; A61P 7/02; C12N 15/63

(52) U.S. Cl. CPC C12N 9/6489; A61P 7/02; C12N 15/63; C12Y 304/24087

(57) ABSTRACT

The disclosure provides improved ADAMTS13 variants with amino acid substitutions in the linker 3 region. The disclosure also provides methods for producing and using the variants.

### TECHNICAL FIELD

[0001] The present disclosure relates to the fields of molecular biology and enzymology. The present disclosure also relates to methods of medical treatment and prophylaxis.

### BACKGROUND

[0002] ADAMTS13 (adisintegrin-like and metalloprotease with thrombospondin type 1 motif 13) is a protease which regulates blood homeostasis by cleaving von Willebrand factor (VWF). Specifically, ADAMTS13 is a zinc-containing metalloprotease enzyme that cleaves VWF for breakdown.

[0003] VWF is an adhesive plasma glycoprotein that circulates as large globular multimers (Sadler et al., 2009). In this large globular multimer conformation, VWF is unable to capture platelets. The conformation of VWF is changed when bound at sites of vessel damage; this conformational change is driven by the shear force of flowing blood to enable platelet capture.

[0004] The biological breakdown of VWF is largely mediated by ADAMTS13, ADAMTS13 cleaves VWF between tyrosine at position 842 and methionine at position 843 (or 1605-1606 of the gene) in the A2 domain.

[0005] This breaks down VWF into smaller units, which are degraded by other peptidases.

[0006] VWF is required for normal platelet adhesion, but exaggerated VWF adhesive activity has been proposed to cause thrombotic thrombocytopenic purpura (TTP) (Moake et al., 1982). Additionally, ADAMTS13 and VWF have been implicated as important factors in other thrombotic diseases such as stroke (De Meyer et al., 2012).

[0007] Thrombus formation is central to the occurrence of acute ischemic stroke. Current antithrombotics used to treat or prevent cerebral ischemia are only moderately effective or bear an increased risk of severe bleeding (De Meyer et al. 2012). There is only one licensed thrombolytic therapy for the treatment of acute ischaemic stroke, recombinant tissue plasminogen activator (rt-PA), which is not widely administered due to an associated risk of haemorrhagic transformation (Wang et al. 2014). Moreover, resistance to rt-PA thrombolysis is observed in 40-50% of patients which is believed to result from varying clot composition.

[0008] Administration of rt-PA has been the standard practice of care for 25 years (National Institute of Neurological and Stroke 1995). Retrospective analysis of CT angiograms show rt-PA treatment has minimal effect on large proximal occlusions located in the internal carotid artery or basilar artery (Bhatia et al. 2010). In addition, recent data from the DIRECT-MT clinical trial shows endovascular thrombectomy alone is non-inferior to combined rt-PA administration and endovascular thrombectomy (Yang et al. 2020). Moreover, a landscape of associated risks evolving over the years have caused drastic refinements in the guidelines of rt-PA use, specifying complex eligibility criteria and a narrow window in which administration is safe (0-4.5 h), causing restricted access for many (Whiteley et al. 2016; Emberson et al. 2014). Therefore uncertainty in the safety and effectiveness of rt-PA prompts demand for novel thrombolytic agents in AIS.

[0009] A proportion of stroke patients present with thrombi particularly rich in VWF (Denorme et al. 2016) and a high VWF:ADAMTS13 ratio is not only predisposing for AIS it is also consistent with poorer outcome and increased mortality (Taylor et al. 2020; Sonneveld et al. 2015). Interestingly, in a murine model of middle cerebral artery (MCA) ischaemic stroke, administration of recombinant ADAMTS13 was shown to be effective in the dissolution of VWF-rich occlusions which were resistant to rt-PA treatment (Denorme et al. 2016). This result is in line with previous studies which report ADAMTS13 deletion is detrimental to infarct size and neurological outcomes post-stroke whereas VWF−/− animals are protected (Fujioka et al. 2010; Kleinschnitz et al. 2009).

[0010] The VWF-ADAMTS13 axis is also known to play a central role in thrombo-inflammation, a process which is increasingly recognised as exacerbating infarct development, now a therapeutic target in itself (Stoll and Nieswandt 2019). In non-Inflammatory conditions, ADAMTS13 deficiency leads to increased VWF dependent endothelial activation, P-selectin upregulation and leukocyte rolling. In inflamed vessels, increased leukocyte extravation and adhesion is observed (Chauhan et al. 2008). Likewise, using the murine filament model of ischemic stroke, ADAMTS13 deficiency enhances immune cell infiltration, neutrophil extravasation and proinflammatory cytokine release in the ipsilateral brain hemisphere (Khan et al. 2012). Additionally, VWF has been shown to co-localise with neutrophil extracellular traps (NETs), known promotors of platelet recruitment and thrombogenesis (Martinod and Wagner 2014). In a murine model of MRSA induced liver injury, ADAMTS13 administration was demonstrated to free VWF-dependent NET adhesion to the inflamed vessel wall (Kolaczkowska et al. 2015).

[0011] In terms of safety, the use of rt-PA increases the risk of intracerebral haemorrhage In up to 7% of AIS patients (Yaghi et al. 2017). The risk of haemorrhage rises proportionally with stroke severity and delay in rt-PA administration (Whiteley et al. 2016). Before administration of rt-PA, risk factors which increase the likelihood of haemorrhagic transformation must first be ruled out during which time the efficacy of rt-PA diminishes. In a murine model of haemorrhagic stroke, ADAMTS13 administration has no effect on bleeding and may, in fact, be of therapeutic potential In this condition (Zhao et al. 2009).

[0012] Recombinant ADAMTS13 (rADAMTS13) has systemic antithrombotic activity in ADAMTS13^{-/-} mice (De Meyer et al., 2012b). Additionally, rADAMTS-13 has been shown to have protective effects in murine stroke models without the risk of intracerebral haemorrhage associated with rt-PA (Nakano et al., 2015).

[0013] Whilst initial results for ADAMTS13 therapies were promising, the need for very high doses has hindered progress. This high dose requirement can be explained by a recently discovered ADAMTS13 activation mechanism. As wild type ADAMTS13 requires substrate-Induced conformational activation to achieve full activity, the administration of high doses is required to achieve an effective concentration of active ADAMTS13. Studies have found that ADAMTS13 circulates in a quiescent conformation, maintained by an autoinhibitory interaction between its N-terminal spacer domain and its C-terminal CUB domains (South et al., 2014).

[0014] It has been found that three linker regions in the distal domains of ADAMTS13 are important for flexibility and enable the interaction between the proximal and the T8-CUB2 domains during the inactive state (Deforche et al., 2015). More recent research performed binding and functional studies on a panel of truncated ADAMTS13 variants to develop a model for the conformational activation of structurally quiescent ADAMTS13 by VWF (South et al., 2017). Results indicated that both the isolated CUB1 and CUB2 domains in ADAMTS13 bind to the spacer domain exosite of a truncated ADAMTS13 variant. However, only the CUB1 domain inhibited proteolytic activity of the truncated ADAMTS13 variant. The combination of findings from this study support an ADAMTS13 activation model in which VWF D4-CK engages the TSP8-CUB2 domains, inducing the conformational change that disrupts the CUB1-spacer domain interaction and thereby activates ADAMTS13. This study therefore suggests that the most important domains for ADAMTS13 conformational activation are the two CUB domains and the spacer region.

[0015] ADAMTS13 variants have previously been generated with amino acid substitutions in the spacer region in an effort to prevent the need for conformational activation and overcome the problems with wild type ADAMTS13 therapy. The gain of function (GoF) ADAMTS13 variant (R568K/F592Y/R660K/Y661F/Y665F), was shown to have disrupted autoinhibition and enhanced proteolytic activity (Jian et al., 2012). Furthermore, this GoF variant restored cerebral blood flow at a lower dose than wild type ADAMTS-13 and retained some ability to recanalize vessels when administration was delayed by 1 h in a murine stroke model (South et al., 2018). However, the reduction in dose requirement demonstrated by the GoF mutant may not be sufficient to fully overcome the problem associated with wildtype ADAMTS13. Additionally, the efficacy of the GoF mutant is reduced when administration is delayed. The development of variants with a greater reduction in dose requirement and an improved efficacy after delayed administration could lead to a more clinically significant therapy.

[0016] The present disclosure has been devised in light of the above considerations. The inventors have identified that the linker 3 region of the ADAMTS13 protein is key to the conformational activation mechanism and have produced a number of improved ADAMTS13 variants with amino acid substitutions in the linker 3 region for the first time.

### SUMMARY

[0017] In a first aspect, the present disclosure provides an ADAMTS13 variant having an amino acid sequence comprising one or more amino acid substitutions in the region corresponding to SEQ ID NO:48 relative to the amino acid sequence of wildtype human ADAMTS13.

[0018] In some embodiments, the ADAMTS13 variant comprises substitution at one or more of the following positions relative to the amino acid sequence of wildtype human ADAMTS13: A1144, A1145, A1146, P1147, P1154, P1171, P1173, P1175, P1180, and P1182.

[0019] In some embodiments, an ADAMTS13 variant comprises substitution of an alanine residue with a valine, isoleucine, lysine, leucine, or methionine residue relative to the amino acid sequence of wildtype human ADAMTS13. In some embodiments, an ADAMTS13 variant comprises substitution of an alanine residue with a valine, isoleucine, or lysine residue relative to the amino acid sequence of wildtype human ADAMTS13.

[0020] In some embodiments, an ADAMTS13 variant comprises substitution of a proline residue with a valine, isoleucine, lysine, leucine, or methionine residue relative to the amino acid sequence of wildtype human ADAMTS13. In some embodiments, an ADAMTS13 variant comprises substitution of a praline residue with a valine, isoleucine, or lysine residue relative to the amino acid sequence of wildtype human ADAMTS13.

[0021] In some embodiments, the ADAMTS13 variant comprises an amino acid sequence according to SEQ ID NO:50 or 156.

[0022] In some embodiments, the ADAMTS13 variant comprises substitution to valine, isoleucine, or lysine at one or more of the following positions relative to the amino acid sequence of wildtype human ADAMTS13: A1144, A1145, A1146, P1147, P1154, P1171, P1173, P1175, P1180, and P1182.

[0023] In some embodiments, the ADAMTS13 variant comprises:
[0024] (i) the amino acid sequence of SEQ ID NO:51, 52, 53, 54, 55, 56, 57, 58, 59, or 60; or
[0025] (ii) the amino acid sequence of SEQ ID NO:136, 137, 138, 139, 140, 141, 142, 143, 144, or 145; or
[0026] (iii) the amino acid sequence of SEQ ID NO:146, 147, 148, 149, 150, 151, 152, 153, 154, or 155.

[0027] In some embodiments, the ADAMTS13 variant comprises: (i) the amino acid sequence of SEQ ID NO:51; or (ii) the amino acid sequence of SEQ ID NO:52; or (iii) the amino acid sequence of SEQ ID NO:53; or (iv) the amino acid sequence of SEQ ID NO:54; or (v) the amino acid sequence of SEQ ID NO:55; or (vi) the amino acid sequence of SEQ ID NO:56; or (vii) the amino acid sequence of SEQ ID NO:57; or (viii) the amino acid sequence of SEQ ID NO:58; or (ix) the amino acid sequence of SEQ ID NO:59; or (x) the amino acid sequence of SEQ ID NO:60.

[0028] In some embodiments, the ADAMTS13 variant comprises: (i) the amino acid sequence of SEQ ID NO:136; or (ii) the amino acid sequence of SEQ ID NO:137; or (iii) the amino acid sequence of SEQ ID NO:138; or (iv) the amino acid sequence of SEQ ID NO:139; or (v) the amino acid sequence of SEQ ID NO:140; or (vi) the amino acid sequence of SEQ ID NO:141; or (vii) the amino acid sequence of SEQ ID NO:142; or (viii) the amino acid sequence of SEQ ID NO:143; or (ix) the amino acid sequence of SEQ ID NO:144; or (x) the amino acid sequence of SEQ ID NO:145.

[0029] In some embodiments, the ADAMTS13 variant comprises: (i) the amino acid sequence of SEQ ID NO:146; or (ii) the amino acid sequence of SEQ ID NO:147; or (iii) the amino acid sequence of SEQ ID NO:148; or (iv) the amino acid sequence of SEQ ID NO:149; or (v) the amino acid sequence of SEQ ID NO:150; or (vi) the amino acid sequence of SEQ ID NO:151; or (vii) the amino acid sequence of SEQ ID NO:152; or (viii) the amino acid sequence of SEQ ID NO:153; or (ix) the amino acid sequence of SEQ ID NO:154; or (x) the amino acid sequence of SEQ ID NO:155.

[0030] In some embodiments, the ADAMTS13 variant comprises substitution to valine, isoleucine, or lysine at one or both of positions P1180 and/or P1182 relative to the amino acid sequence of wildtype human ADAMTS13.

[0031] In some embodiments, the ADAMTS13 variant comprises the amino acid sequence of SEQ ID NO:59, 60, 144, 145, 154, or 155.

[0032] In some embodiments, the ADAMTS13 variant comprises or consists of: (i) an amino acid sequence having at least 60% sequence identity to the amino acid sequence of SEQ ID NO:61; or (ii) an amino acid sequence having at least 60% sequence identity to the amino acid sequence of SEQ ID NO:62; or (iii) an amino acid sequence having at least 60% sequence identity to the amino acid sequence of SEQ ID NO:63; or (iv) an amino acid sequence having at least 60% sequence identity to the amino acid sequence of SEQ ID NO:64; or (v) an amino acid sequence having at least 60% sequence identity to the amino acid sequence of SEQ ID NO 65; or (vi) an amino acid sequence having at least 60% sequence identity to the amino acid sequence of SEQ ID NO:66; or (vii) an amino acid sequence having at least 60% sequence identity to the amino acid sequence of SEQ ID NO:67; or (viii) an amino acid sequence having at least 60% sequence identity to the amino acid sequence of SEQ ID NO 68; or (ix) an amino acid sequence having at least 60% sequence identity to the amino acid sequence of SEQ ID NO:69; or (x) an amino acid sequence having at least 60% sequence identity to the amino acid sequence of SEQ ID NO:70.

[0033] In some embodiments, the ADAMTS13 variant displays increased proteolytic activity as compared to wildtype human ADAMTS13.

[0034] The present disclosure also provides a nucleic acid encoding an ADAMTS13 variant according to the present disclosure.

[0035] The present disclosure also provides an expression vector, comprising a nucleic acid according to the present disclosure.

[0036] The present disclosure also provides a cell comprising an ADAMTS13 variant, a nucleic acid, or an expression vector according to the present disclosure.

[0037] The present disclosure also provides a method for producing an ADAMTS13 variant, comprising culturing a cell comprising a nucleic acid or expression vector according to the present disclosure, under conditions suitable for expression of an ADAMTS13 variant by the cell.

[0038] The present disclosure also provides a pharmaceutical composition comprising an ADAMTS13 variant, a nucleic acid, an expression vector, or a cell according to the present disclosure, and a pharmaceutically acceptable carrier, diluent, excipient or adjuvant.

[0039] The present disclosure also provides an ADAMTS13 variant, a nucleic acid, an expression vector, a cell, or a composition according to the present disclosure, for use in a method of medical treatment or prophylaxis.

[0040] The present disclosure also provides an ADAMTS13 variant, a nucleic acid, an expression vector, a cell, or a composition according to the present disclosure, for use in a method of treatment or prevention of a disease or condition characterised by one or more of: an increased level and/or activity of VWF, or of a complex comprising VWF; a reduced level of ADAMTS13; a reduced level of ADAMTS13 proteolytic activity; thrombosis; and inflammation.

[0041] The present disclosure also provides the use of an ADAMTS13 variant, a nucleic acid, an expression vector, a cell, or a composition according to the present disclosure in the manufacture of a medicament for use in a method of treatment or prevention of a disease or condition characterised by one or more of: an increased level and/or activity of VWF, or of a complex comprising VWF; a reduced level of ADAMTS13; a reduced level of ADAMTS13 proteolytic activity; thrombosis; and inflammation.

[0042] The present disclosure also provides a method of treating or preventing a disease or condition characterised by one or more of: an increased level and/or activity of VWF, or of a complex comprising VWF; a reduced level of ADAMTS13; a reduced level of ADAMTS13 proteolytic activity; thrombosis; and inflammation, comprising administering to a subject a therapeutically or prophylactically effective amount of an ADAMTS13 variant, a nucleic acid, an expression vector, a cell, or a composition according to the present disclosure.

[0043] In some embodiments, the disease or condition is selected from: a disease/condition characterised by thrombosis, a disease/condition characterised by inflammation, thrombotic thrombocytopenic purpura (TTP), ischaemic stroke, haemorrhagic stroke, subarachnoid haemorrhage (SAH), intracerebral haemorrhage (ICH), chronic thromboembolic pulmonary hypotension (CTEPH), myocardial infarction (MI), ST-elevation myocardial infarction (STEMI), unstable angina (UA), ischemia, reperfusion, deep venous thrombosis, pulmonary embolism, intravascular coagulation (DIC), hemolytic-uremic syndrome (HUS), cerebral infarction, systemic lupus erythematosus (SLE), disease cause by infection with a SARSr-CoV (e.g. SARS-CoV-2; e.g. COVID-19), acute respiratory distress syndrome (ARDS), pneumonia, kidney damage, nephropathy, microvascular diseases, dementia, Crohn's disease, inflammatory bowel disease, ulcerative colitis, and bacterial diarrhoea.

[0044] The present disclosure also provides a method of cleaving VWF, comprising contacting VWF or a complex comprising VWF with an ADAMTS13 variant according to the present disclosure.

[0045] The present disclosure includes the combination of the aspects and preferred features described herein except where such combinations are clearly impermissible or expressly avoided.

Sequences

| SEQ | | |
|---|---|---|
| ID | Description | Sequence |
| 1 | Human ADAMTS13 | MHQRHPRARCPPLCVAGILACGFLLGCWGPSHFQQSCLQALEPQAVSSYL |
| | isoform 1 (UniProt: | SPGAPLKGRPPSPGFQRQRQRQRRAAGGILHLELLVAVGPDVFQAHQEDT |
| | Q76LX8-1, v1) | ERYVLTNLNIGAELLRDPSLGAQFRVHLVKMVILTEPEGAPNITANLTSS |
| | | LLSVCGWSQTINPEDDTDPGHADLVLYITRFDLELPDGNRQVRGVTQLGG |
| | | ACSPTWSCLITEDTGFDLGVTIAHEIGHSFGLEHDGAPGSGCGPSGHVMA |
| | | SDGAAPRAGLAWSPCSRRQLLSLLSAGRARCVWDPPRPQPGSAGHPPDAQ |
| | | PGLYYSANEQCRVAFGPKAVACTFAREHLDMCQALSCHTDPLDQSSCSRL |
| | | LVPLLDGTECGVEKWCSKGRCRSLVELTPIAAVHGRWSSWGPRSPCSRSC |
| | | GGGVVTRRRQCNNPRPAFGGRACVGADLQAEMCNTQACEKTQLEFMSQQC |
| | | ARTDGQPLRSSPGGASFYHWGAAVPHSQGDALCRHMCRAIGESFIMKRGD |
| | | SFLDGTRCMPSGPREDGTLSLCVSGSCRTFGCDGRMDSQQVWDRCQVCGG |
| | | DNSTCSPRKGSFTAGRAREYVTFLTVTPNLTSVYIANHRPLFTHLAVRIG |
| | | GRYVVAGKMSISPNTTYPSLLEDGRVEYRVALTEDRLPRLEEIRIWGPLQ |
| | | EDADIQVYRRYGEEYGNLTRPDITFTYFQPKPRQAWVWAAVRGPCSVSCG |
| | | AGLRWVNYSCLDQARKELVETVQCQGSQQPPAWPEACVLEPCPPYWAVGD |
| | | FGPCSASCGGGLRERPVRCVEAQGSLLKTLPPARCRAGAQQPAVALETCN |
| | | PQPCPARWEVSEPSSCTSAGGAGLALENETCVPGADGLEAPVTEGPGSVD |
| | | EKLPAPEPCVGMSCPPGWGHLDATSAGEKAPSPWGSIRTGAQAAHVWTPA |
| | | AGSCSVSCGRGLMELRFLCMDSALRVPVQEELCGLASKPGSRREVCQAVP |
| | | CPARWQYKLAACSVSCGRGVVRRILYCARAHGEDDGEEILLDTQCQGLPR |
| | | PEPQEACSLEPCPPRWKVMSLGPCSASCGLGTARRSVACVQLDQGQDVEV |
| | | DEAACAALVRPEASVPCLIADCTYRWHVGTWMECSVSCGDGIQRRRDTCL |
| | | GPQAQAPVPADFCQHLPKPVTVRGCWAGPCVGQGTPSLVPHEEAAAPGRT |
| | | TATPAGASLEWSQARGLLFSPAPQPRRLLPGPQENSVQSSACGRQHLEPT |
| | | GTIDMRGPGQADCAVAIGRPLGEVVTLRVLESSLNCSAGDMLLLWGRLTW |
| | | RKMCRKLLDMTFSSKTNTLVVRQRCGRPGGGVLLRYGSQLAPETFYRECD |
| | | MQLFGPWGEIVSPSLSPATSNAGGCRLFINVAPHARIAIHALATNMGAGT |
| | | EGANASYILIRDTHSLRTTAFHGQQVLYWESESSQAEMEFSEGFLKAQAS |
| | | LRGQYWTLQSWVPEMQDPQSWKGKEGT |
| 2 | Human ADAMTS13 | MHQRHPRARCPPLCVAGILACGFLLGCWGPSHFQQSCLQALEPQAVSSYL |
| | isoform 2 (UniProt: | SPGAPLKGRPPSPGFQRQRQRQRRAAGGILHLELLVAVGPDVFQAHQEDT |
| | Q76LX8-2) | ERYVLTNLNIGAELLRDPSLGAQFRVHLVKMVILTEPEGAPNITANLTSS |
| | | LLSVCGWSQTINPEDDTDPGHADLVLYITRFDLELPDGNRQVRGVTQLGG |
| | | ACSPTWSCLITEDTGFDLGVTIAHEIGHSFGLEHDGAPGSGCGPSGHVMA |
| | | SDGAAPRAGLAWSPCSRRQLLSLLSAGRARCVWDPPRPQPGSAGHPPDAQ |
| | | PGLYYSANEQCRVAFGPKAVACTFAREHLDMCQALSCHTDPLDQSSCSRL |
| | | LVPLLDGTECGVEKWCSKGRCRSLVELTPIAAVHGRWSSWGPRSPCSRSC |
| | | GGGVVTRRRQCNNPRPAFGGRACVGADLQAEMCNTQACEKTQLEFMSQQC |
| | | ARTDGQPLRSSPGGASFYHWGAAVPHSQGDALCRHMCRAIGESFIMKRGD |
| | | SFLDGTRCMPSGPREDGTLSLCVSGSCRTFGCDGRMDSQQVWDRCQVCGG |
| | | DNSTCSPRKGSFTAGRAREYVTFLTVTPNLTSVYIANHRPLFTHLAVRIG |
| | | GRYVVAGKMSISPNTTYPSLLEDGRVEYRVALTEDRLPRLEEIRIWGPLQ |
| | | EDADIQVYRRYGEEYGNLTRPDITFTYFQPKPRQAWVWAAVRGPCSVSCG |
| | | AGLRWVNYSCLDQARKELVETVQCQGSQQPPAWPEACVLEPCPPYWAVGD |
| | | FGPCSASCGGGLRERPVRCVEAQGSLLKTLPPARCRAGAQQPAVALETCN |
| | | PQPCPARWEVSEPSSCTSAGGAGLALENETCVPGADGLEAPVTEGPGSVD |
| | | EKLPAPEPCVGMSCPPGWGHLDATSAGEKAPSPWGSIRTGAQAAHVWTPA |
| | | AGSCSVSCGRGLMELRFLCMDSALRVPVQEELCGLASKPGSRREVCQAVP |
| | | CPARWQYKLAACSVSCGRGVVRRILYCARAHGEDDGEEILLDTQCQGLPR |
| | | PEPQEACSLEPCPPRWKVMSLGPCSASCGLGTARRSVACVQLDQGQDVEV |
| | | DEAACAALVRPEASVPCLIADCTYRWHVGTWMECSVSCGDGIQRRRDTCL |
| | | GPQAQAPVPADFCQHLPKPVTVRGCWAGPCVGQGACGRQHLEPTGTIDMR |
| | | GPGQADCAVAIGRPLGEVVTLRVLESSLNCSAGDMLLLWGRLTWRKMCRK |
| | | LLDMTFSSKTNTLVVRQRCGRPGGGVLLRYGSQLAPETFYRECDMQLFGP |
| | | WGEIVSPSLSPATSNAGGCRLFINVAPHARIAIHALATNMGAGTEGANAS |
| | | YILIRDTHSLRTTAFHGQQVLYWESESSQAEMEFSEGFLKAQASLRGQYW |
| | | TLQSWVPEMQDPQSWKGKEGT |
| 3 | Human ADAMTS13 | MHQRHPRARCPPLCVAGILACGFLLGCWGPSHFQQSCLQALEPQAVSSYL |
| | isoform 3 (UniProt: | SPGAPLKGRPPSPGFQRQRQRQRRAAGGILHLELLVAVGPDVFQAHQEDT |
| | Q76LX8-2) | ERYVLTNLNIGAELLRDPSLGAQFRVHLVKMVILTEPEGAPNITANLTSS |
| | | LLSVCGWSQTINPEDDTDPGHADLVLYITRFDLELPDGNRQVRGVTQLGG |
| | | ACSPTWSCLITEDTGFDLGVTIAHEIGHSFGLEHDGAPGSGCGPSGHVMA |
| | | SDGAAPRAGLAWSPCSRRQLLSLLSANEQCRVAFGPKAVACTFAREHLDM |
| | | CQALSCHTDPLDQSSCSRLLVPLLDGTECGVEKWCSKGRCRSLVELTPIA |
| | | AVHGRWSSWGPRSPCSRSCGGGVVTRRRQCNNPRPAFGGRACVGADLQAE |
| | | MCNTQACEKTQLEFMSQQCARTDGQPLRSSPGGASFYHWGAAVPHSQGDA |
| | | LCRHMCRAIGESFIMKRGDSFLDGTRCMPSGPREDGTLSLCVSGSCRTFG |
| | | CDGRMDSQQVWDRCQVCGGDNSTCSPRKGSFTAGRAREYVTFLTVTPNLT |
| | | SVYIANHRPLFTHLAVRIGGRYVVAGKMSISPNTTYPSLLEDGRVEYRVA |
| | | LTEDRLPRLEEIRIWGPLQEDADIQVYRRYGEEYGNLTRPDITFTYFQPK |
| | | PRQAWVWAAVRGPCSVSCGAGLRWVNYSCLDQARKELVETVQCQGSQQPP |
| | | AWPEACVLEPCPPYWAVGDFGPCSASCGGGLRERPVRCVEAQGSLLKTLP |
| | | PARCRAGAQQPAVALETCNPQPCPARWEVSEPSSCTSAGGAGLALENETC |
| | | VPGADGLEAPVTEGPGSVDEKLPAPEPCVGMSCPPGWGHLDATSAGEKAP |
| | | SPWGSIRTGAQAAHVWTPAAGSCSVSCGRGLMELRFLCMDSALRVPVQEE |
| | | LCGLASKPGSRREVCQAVPCPARWQYKLAACSVSCGRGVVRRILYCARAH |
| | | GEDDGEEILLDTQCQGLPRPEPQEACSLEPCPPRWKVMSLGPCSASCGLG |
| | | TARRSVACVQLDQGQDVEVDEAACAALVRPEASVPCLIADCTYRWHVGTW |
| | | MECSVSCGDGIQRRRDTCLGPQAQAPVPADFCQHLPKPVTVRGCWAGPCV |
| | | GQGACGRQHLEPTGTIDMRGPGQADCAVAIGRPLGEVVTLRVLESSLNCS |
| | | AGDMLLLWGRLTWRKMCRKLLDMTFSSKTNTLVVRQRCGRPGGGVLLRYG |
| | | SQLAPETFYRECDMQLFGPWGEIVSPSLSPATSNAGGCRLFINVAPHARI |
| | | AIHALATNMGAGTEGANASYILIRDTHSLRTTAFHGQQVLYWESESSQAE |
| | | MEFSEGFLKAQASLRGQYWTLQSWVPEMQDPQSWKGKEGT |
| 4 | Human ADAMTS13 | MDMCQALSCHTDPLDQSSCSRLLVPLLDGTECGVEKWCSKGRCRSLVELT |
| | isoform 4 (UniProt: | PIAAVHGRWSSWGPRSPCSRSCGGGVVTRRRQCNNPRPAFGGRACVGADL |
| | Q76LX8-2) | QAEMCNTQACEKTQLEFMSQQCARTDGQPLRSSPGGASFYHWGAAVPHSQ |
| | | GDALCRHMCRAIGESFIMKRGDSFLDGTRCMPSGPREDGTLSLCVSGSCR |
| | | TFGCDGRMDSQQVWDRCQVCGGDNSTCSPRKGSFTAGRAREYVTFLTVTP |
| | | NLTSVYIANHRPLFTHLAVRIGGRYVVAGKMSISPNTTYPSLLEDGRVEY |
| | | RVALTEDRLPRLEEIRIWGPLQEDADIQVGGVRAQLMHISWWSRPGLGER |
| | | DLCARGRWPGGSSD |
| 5 | Human ADAMTS13 | MHQRHPRARCPPLCVAGILACGFLLGCWG |
| | isoform 1, 2, 3 signal | |
| | peptide (positions 1 | |
| | to 29 of UniProt: | |
| | Q76LX8-1, v1) | |
| 6 | Human ADAMTS13 | PSHFQQSCLQALEPQAVSSYLSPGAPLKGRPPSPGFQRQRQRQRR |
| | isoform 1, 2, 3 | |
| | propeptide (positions | |
| | 30 to 74 of UniProt: | |
| | Q76LX8-1, v1) | |
| 7 | Human ADAMTS13 | PSHFQQSCLQALEPQAVSSYLSPGAPLKGRPPSPGFQRQRQRQRRAAGGI |
| | isoform 1 lacking | LHLELLVAVGPDVFQAHQEDTERYVLTNLNIGAELLRDPSLGAQFRVHLV |
| | signal peptide | KMVILTEPEGAPNITANLTSSLLSVCGWSQTINPEDDTDPGHADLVLYIT |
| | (positions 30 to 1427 | RFDLELPDGNRQVRGVTQLGGACSPTWSCLITEDTGFDLGVTIAHEIGHS |
| | of UniProt: Q76LX8- | FGLEHDGAPGSGCGPSGHVMASDGAAPRAGLAWSPCSRRQLLSLLSAGRA |
| | 1, v1) | RCVWDPPRPQPGSAGHPPDAQPGLYYSANEQCRVAFGPKAVACTFAREHL |
| | | DMCQALSCHTDPLDQSSCSRLLVPLLDGTECGVEKWCSKGRCRSLVELTP |
| | | IAAVHGRWSSWGPRSPCSRSCGGGVVTRRRQCNNPRPAFGGRACVGADLQ |
| | | AEMCNTQACEKTQLEFMSQQCARTDGQPLRSSPGGASFYHWGAAVPHSQG |
| | | DALCRHMCRAIGESFIMKRGDSFLDGTRCMPSGPREDGTLSLCVSGSCRT |
| | | FGCDGRMDSQQVWDRCQVCGGDNSTCSPRKGSFTAGRAREYVTFLTVTPN |
| | | LTSVYIANHRPLFTHLAVRIGGRYVVAGKMSISPNTTYPSLLEDGRVEYR |
| | | VALTEDRLPRLEEIRIWGPLQEDADIQVYRRYGEEYGNLTRPDITFTYFQ |
| | | PKPRQAWVWAAVRGPCSVSCGAGLRWVNYSCLDQARKELVETVQCQGSQQ |
| | | PPAWPEACVLEPCPPYWAVGDFGPCSASCGGGLRERPVRCVEAQGSLLKT |
| | | LPPARCRAGAQQPAVALETCNPQPCPARWEVSEPSSCTSAGGAGLALENE |
| | | TCVPGADGLEAPVTEGPGSVDEKLPAPEPCVGMSCPPGWGHLDATSAGEK |
| | | APSPWGSIRTGAQAAHVWTPAAGSCSVSCGRGLMELRFLCMDSALRVPVQ |
| | | EELCGLASKPGSRREVCQAVPCPARWQYKLAACSVSCGRGVVRRILYCAR |
| | | AHGEDDGEEILLDTQCQGLPRPEPQEACSLEPCPPRWKVMSLGPCSASCG |
| | | LGTARRSVACVQLDQGQDVEVDEAACAALVRPEASVPCLIADCTYRWHVG |
| | | TWMECSVSCGDGIQRRRDTCLGPQAQAPVPADFCQHLPKPVTVRGCWAGP |
| | | CVGQGTPSLVPHEEAAAPGRTTATPAGASLEWSQARGLLFSPAPQPRRLL |
| | | PGPQENSVQSSACGRQHLEPTGTIDMRGPGQADCAVAIGRPLGEVVTLRV |
| | | LESSLNCSAGDMLLLWGRLTWRKMCRKLLDMTFSSKTNTLVVRQRCGRPG |
| | | GGVLLRYGSQLAPETFYRECDMQLFGPWGEIVSPSLSPATSNAGGCRLFI |
| | | NVAPHARIAIHALATNMGAGTEGANASYILIRDTHSLRTTAFHGQQVLYW |
| | | ESESSQAEMEFSEGFLKAQASLRGQYWTLQSWVPEMQDPQSWKGKEGT |
| 8 | Mature human | AAGGILHLELLVAVGPDVFQAHQEDTERYVLTNLNIGAELLRDPSLGAQF |
| | ADAMTS13 isoform | RVHLVKMVILTEPEGAPNITANLTSSLLSVCGWSQTINPEDDTDPGHADL |
| | 1 lacking signal | VLYITRFDLELPDGNRQVRGVTQLGGACSPTWSCLITEDTGFDLGVTIAH |
| | peptide and | EIGHSFGLEHDGAPGSGCGPSGHVMASDGAAPRAGLAWSPCSRRQLLSLL |
| | propeptide (positions | SAGRARCVWDPPRPQPGSAGHPPDAQPGLYYSANEQCRVAFGPKAVACTF |
| | 75 to 1427 of | AREHLDMCQALSCHTDPLDQSSCSRLLVPLLDGTECGVEKWCSKGRCRSL |
| | UniProt: Q76LX8-1, | VELTPIAAVHGRWSSWGPRSPCSRSCGGGVVTRRRQCNNPRPAFGGRACV |
| | v1) | GADLQAEMCNTQACEKTQLEFMSQQCARTDGQPLRSSPGGASFYHWGAAV |
| | | PHSQGDALCRHMCRAIGESFIMKRGDSFLDGTRCMPSGPREDGTLSLCVS |
| | | GSCRTFGCDGRMDSQQVWDRCQVCGGDNSTCSPRKGSFTAGRAREYVTFL |
| | | TVTPNLTSVYIANHRPLFTHLAVRIGGRYVVAGKMSISPNTTYPSLLEDG |
| | | RVEYRVALTEDRLPRLEEIRIWGPLQEDADIQVYRRYGEEYGNLTRPDIT |
| | | FTYFQPKPRQAWVWAAVRGPCSVSCGAGLRWVNYSCLDQARKELVETVQC |
| | | QGSQQPPAWPEACVLEPCPPYWAVGDFGPCSASCGGGLRERPVRCVEAQG |
| | | SLLKTLPPARCRAGAQQPAVALETCNPQPCPARWEVSEPSSCTSAGGAGL |
| | | ALENETCVPGADGLEAPVTEGPGSVDEKLPAPEPCVGMSCPPGWGHLDAT |
| | | SAGEKAPSPWGSIRTGAQAAHVWTPAAGSCSVSCGRGLMELRFLCMDSAL |
| | | RVPVQEELCGLASKPGSRREVCQAVPCPARWQYKLAACSVSCGRGVVRRI |
| | | LYCARAHGEDDGEEILLDTQCQGLPRPEPQEACSLEPCPPRWKVMSLGPC |
| | | SASCGLGTARRSVACVQLDQGQDVEVDEAACAALVRPEASVPCLIADCTY |
| | | RWHVGTWMECSVSCGDGIQRRRDTCLGPQAQAPVPADFCQHLPKPVTVRG |
| | | CWAGPCVGQGTPSLVPHEEAAAPGRTTATPAGASLEWSQARGLLFSPAPQ |
| | | PRRLLPGPQENSVQSSACGRQHLEPTGTIDMRGPGQADCAVAIGRPLGEV |
| | | VTLRVLESSLNCSAGDMLLLWGRLTWRKMCRKLLDMTFSSKTNTLVVRQR |
| | | CGRPGGGVLLRYGSQLAPETFYRECDMQLFGPWGEIVSPSLSPATSNAGG |
| | | CRLFINVAPHARIAIHALATNMGAGTEGANASYILIRDTHSLRTTAFHGQ |
| | | QVLYWESESSQAEMEFSEGFLKAQASLRGQYWTLQSWVPEMQDPQSWKGK |
| | | EGT |
| 9 | Human ADAMTS13 | PSHFQQSCLQALEPQAVSSYLSPGAPLKGRPPSPGFQRQRQRQRRAAGGI |
| | isoform 2 lacking | LHLELLVAVGPDVFQAHQEDTERYVLTNLNIGAELLRDPSLGAQFRVHLV |
| | signal peptide | KMVILTEPEGAPNITANLTSSLLSVCGWSQTINPEDDTDPGHADLVLYIT |
| | | RFDLELPDGNRQVRGVTQLGGACSPTWSCLITEDTGFDLGVTIAHEIGHS |
| | | FGLEHDGAPGSGCGPSGHVMASDGAAPRAGLAWSPCSRRQLLSLLSAGRA |
| | | RCVWDPPRPQPGSAGHPPDAQPGLYYSANEQCRVAFGPKAVACTFAREHL |
| | | DMCQALSCHTDPLDQSSCSRLLVPLLDGTECGVEKWCSKGRCRSLVELTP |
| | | IAAVHGRWSSWGPRSPCSRSCGGGVVTRRRQCNNPRPAFGGRACVGADLQ |
| | | AEMCNTQACEKTQLEFMSQQCARTDGQPLRSSPGGASFYHWGAAVPHSQG |
| | | DALCRHMCRAIGESFIMKRGDSFLDGTRCMPSGPREDGTLSLCVSGSCRT |
| | | FGCDGRMDSQQVWDRCQVCGGDNSTCSPRKGSFTAGRAREYVTFLTVTPN |
| | | LTSVYIANHRPLFTHLAVRIGGRYVVAGKMSISPNTTYPSLLEDGRVEYR |
| | | VALTEDRLPRLEEIRIWGPLQEDADIQVYRRYGEEYGNLTRPDITFTYFQ |
| | | PKPRQAWVWAAVRGPCSVSCGAGLRWVNYSCLDQARKELVETVQCQGSQQ |
| | | PPAWPEACVLEPCPPYWAVGDFGPCSASCGGGLRERPVRCVEAQGSLLKT |
| | | LPPARCRAGAQQPAVALETCNPQPCPARWEVSEPSSCTSAGGAGLALENE |
| | | TCVPGADGLEAPVTEGPGSVDEKLPAPEPCVGMSCPPGWGHLDATSAGEK |
| | | APSPWGSIRTGAQAAHVWTPAAGSCSVSCGRGLMELRFLCMDSALRVPVQ |
| | | EELCGLASKPGSRREVCQAVPCPARWQYKLAACSVSCGRGVVRRILYCAR |
| | | AHGEDDGEEILLDTQCQGLPRPEPQEACSLEPCPPRWKVMSLGPCSASCG |
| | | LGTARRSVACVQLDQGQDVEVDEAACAALVRPEASVPCLIADCTYRWHVG |
| | | TWMECSVSCGDGIQRRRDTCLGPQAQAPVPADFCQHLPKPVTVRGCWAGP |
| | | CVGQGACGRQHLEPTGTIDMRGPGQADCAVAIGRPLGEVVTLRVLESSLN |
| | | CSAGDMLLLWGRLTWRKMCRKLLDMTFSSKTNTLVVRQRCGRPGGGVLLR |
| | | YGSQLAPETFYRECDMQLFGPWGEIVSPSLSPATSNAGGCRLFINVAPHA |
| | | RIAIHALATNMGAGTEGANASYILIRDTHSLRTTAFHGQQVLYWESESSQ |
| | | AEMEFSEGFLKAQASLRGQYWTLQSWVPEMQDPQSWKGKEGT |
| 10 | Mature human | AAGGILHLELLVAVGPDVFQAHQEDTERYVLTNLNIGAELLRDPSLGAQF |
| | ADAMTS13 isoform | RVHLVKMVILTEPEGAPNITANLTSSLLSVCGWSQTINPEDDTDPGHADL |
| | 2 lacking signal | VLYITRFDLELPDGNRQVRGVTQLGGACSPTWSCLITEDTGFDLGVTIAH |
| | peptide and | EIGHSFGLEHDGAPGSGCGPSGHVMASDGAAPRAGLAWSPCSRRQLLSLL |
| | propeptide | SAGRARCVWDPPRPQPGSAGHPPDAQPGLYYSANEQCRVAFGPKAVACTF |
| | | AREHLDMCQALSCHTDPLDQSSCSRLLVPLLDGTECGVEKWCSKGRCRSL |
| | | VELTPIAAVHGRWSSWGPRSPCSRSCGGGVVTRRRQCNNPRPAFGGRACV |
| | | GADLQAEMCNTQACEKTQLEFMSQQCARTDGQPLRSSPGGASFYHWGAAV |
| | | PHSQGDALCRHMCRAIGESFIMKRGDSFLDGTRCMPSGPREDGTLSLCVS |
| | | GSCRTFGCDGRMDSQQVWDRCQVCGGDNSTCSPRKGSFTAGRAREYVTFL |
| | | TVTPNLTSVYIANHRPLFTHLAVRIGGRYVVAGKMSISPNTTYPSLLEDG |
| | | RVEYRVALTEDRLPRLEEIRIWGPLQEDADIQVYRRYGEEYGNLTRPDIT |
| | | FTYFQPKPRQAWVWAAVRGPCSVSCGAGLRWVNYSCLDQARKELVETVQC |
| | | QGSQQPPAWPEACVLEPCPPYWAVGDFGPCSASCGGGLRERPVRCVEAQG |
| | | SLLKTLPPARCRAGAQQPAVALETCNPQPCPARWEVSEPSSCTSAGGAGL |
| | | ALENETCVPGADGLEAPVTEGPGSVDEKLPAPEPCVGMSCPPGWGHLDAT |
| | | SAGEKAPSPWGSIRTGAQAAHVWTPAAGSCSVSCGRGLMELRFLCMDSAL |
| | | RVPVQEELCGLASKPGSRREVCQAVPCPARWQYKLAACSVSCGRGVVRRI |
| | | LYCARAHGEDDGEEILLDTQCQGLPRPEPQEACSLEPCPPRWKVMSLGPC |
| | | SASCGLGTARRSVACVQLDQGQDVEVDEAACAALVRPEASVPCLIADCTY |
| | | RWHVGTWMECSVSCGDGIQRRRDTCLGPQAQAPVPADFCQHLPKPVTVRG |
| | | CWAGPCVGQGACGRQHLEPTGTIDMRGPGQADCAVAIGRPLGEVVTLRVL |
| | | ESSLNCSAGDMLLLWGRLTWRKMCRKLLDMTFSSKTNTLVVRQRCGRPGG |
| | | GVLLRYGSQLAPETFYRECDMQLFGPWGEIVSPSLSPATSNAGGCRLFIN |
| | | VAPHARIAIHALATNMGAGTEGANASYILIRDTHSLRTTAFHGQQVLYWE |
| | | SESSQAEMEFSEGFLKAQASLRGQYWTLQSWVPEMQDPQSWKGKEGT |
| 11 | Human ADAMTS13 | PSHFQQSCLQALEPQAVSSYLSPGAPLKGRPPSPGFQRQRQRQRRAAGGI |
| | isoform 3 lacking | LHLELLVAVGPDVFQAHQEDTERYVLTNLNIGAELLRDPSLGAQFRVHLV |
| | signal peptide | KMVILTEPEGAPNITANLTSSLLSVCGWSQTINPEDDTDPGHADLVLYIT |
| | | RFDLELPDGNRQVRGVTQLGGACSPTWSCLITEDTGFDLGVTIAHEIGHS |
| | | FGLEHDGAPGSGCGPSGHVMASDGAAPRAGLAWSPCSRRQLLSLLSANEQ |
| | | CRVAFGPKAVACTFAREHLDMCQALSCHTDPLDQSSCSRLLVPLLDGTEC |
| | | GVEKWCSKGRCRSLVELTPIAAVHGRWSSWGPRSPCSRSCGGGVVTRRRQ |
| | | CNNPRPAFGGRACVGADLQAEMCNTQACEKTQLEFMSQQCARTDGQPLRS |
| | | SPGGASFYHWGAAVPHSQGDALCRHMCRAIGESFIMKRGDSFLDGTRCMP |
| | | SGPREDGTLSLCVSGSCRTFGCDGRMDSQQVWDRCQVCGGDNSTCSPRKG |
| | | SFTAGRAREYVTFLTVTPNLTSVYIANHRPLFTHLAVRIGGRYVVAGKMS |
| | | ISPNTTYPSLLEDGRVEYRVALTEDRLPRLEEIRIWGPLQEDADIQVYRR |
| | | YGEEYGNLTRPDITFTYFQPKPRQAWVWAAVRGPCSVSCGAGLRWVNYSC |
| | | LDQARKELVETVQCQGSQQPPAWPEACVLEPCPPYWAVGDFGPCSASCGG |
| | | GLRERPVRCVEAQGSLLKTLPPARCRAGAQQPAVALETCNPQPCPARWEV |
| | | SEPSSCTSAGGAGLALENETCVPGADGLEAPVTEGPGSVDEKLPAPEPCV |
| | | GMSCPPGWGHLDATSAGEKAPSPWGSIRTGAQAAHVWTPAAGSCSVSCGR |
| | | GLMELRFLCMDSALRVPVQEELCGLASKPGSRREVCQAVPCPARWQYKLA |
| | | ACSVSCGRGVVRRILYCARAHGEDDGEEILLDTQCQGLPRPEPQEACSLE |
| | | PCPPRWKVMSLGPCSASCGLGTARRSVACVQLDQGQDVEVDEAACAALVR |
| | | PEASVPCLIADCTYRWHVGTWMECSVSCGDGIQRRRDTCLGPQAQAPVPA |
| | | DFCQHLPKPVTVRGCWAGPCVGQGACGRQHLEPTGTIDMRGPGQADCAVA |
| | | IGRPLGEVVTLRVLESSLNCSAGDMLLLWGRLTWRKMCRKLLDMTFSSKT |
| | | NTLVVRQRCGRPGGGVLLRYGSQLAPETFYRECDMQLFGPWGEIVSPSLS |
| | | PATSNAGGCRLFINVAPHARIAIHALATNMGAGTEGANASYILIRDTHSL |
| | | RTTAFHGQQVLYWESESSQAEMEFSEGFLKAQASLRGQYWTLQSWVPEMQ |
| | | DPQSWKGKEGT |
| 12 | Mature human | AAGGILHLELLVAVGPDVFQAHQEDTERYVLTNLNIGAELLRDPSLGAQF |
| | ADAMTS13 isoform | RVHLVKMVILTEPEGAPNITANLTSSLLSVCGWSQTINPEDDTDPGHADL |
| | 3 lacking signal | VLYITRFDLELPDGNRQVRGVTQLGGACSPTWSCLITEDTGFDLGVTIAH |
| | peptide and | EIGHSFGLEHDGAPGSGCGPSGHVMASDGAAPRAGLAWSPCSRRQLLSLL |
| | propeptide | SANEQCRVAFGPKAVACTFAREHLDMCQALSCHTDPLDQSSCSRLLVPLL |
| | | DGTECGVEKWCSKGRCRSLVELTPIAAVHGRWSSWGPRSPCSRSCGGGVV |
| | | TRRRQCNNPRPAFGGRACVGADLQAEMCNTQACEKTQLEFMSQQCARTDG |
| | | QPLRSSPGGASFYHWGAAVPHSQGDALCRHMCRAIGESFIMKRGDSFLDG |
| | | TRCMPSGPREDGTLSLCVSGSCRTFGCDGRMDSQQVWDRCQVCGGDNSTC |
| | | SPRKGSFTAGRAREYVTFLTVTPNLTSVYIANHRPLFTHLAVRIGGRYVV |
| | | AGKMSISPNTTYPSLLEDGRVEYRVALTEDRLPRLEEIRIWGPLQEDADI |
| | | QVYRRYGEEYGNLTRPDITFTYFQPKPRQAWVWAAVRGPCSVSCGAGLRW |
| | | VNYSCLDQARKELVETVQCQGSQQPPAWPEACVLEPCPPYWAVGDFGPCS |
| | | ASCGGGLRERPVRCVEAQGSLLKTLPPARCRAGAQQPAVALETCNPQPCP |
| | | ARWEVSEPSSCTSAGGAGLALENETCVPGADGLEAPVTEGPGSVDEKLPA |
| | | PEPCVGMSCPPGWGHLDATSAGEKAPSPWGSIRTGAQAAHVWTPAAGSCS |
| | | VSCGRGLMELRFLCMDSALRVPVQEELCGLASKPGSRREVCQAVPCPARW |
| | | QYKLAACSVSCGRGVVRRILYCARAHGEDDGEEILLDTQCQGLPRPEPQE |
| | | ACSLEPCPPRWKVMSLGPCSASCGLGTARRSVACVQLDQGQDVEVDEAAC |
| | | AALVRPEASVPCLIADCTYRWHVGTWMECSVSCGDGIQRRRDTCLGPQAQ |
| | | APVPADFCQHLPKPVTVRGCWAGPCVGQGACGRQHLEPTGTIDMRGPGQA |
| | | DCAVAIGRPLGEVVTLRVLESSLNCSAGDMLLLWGRLTWRKMCRKLLDMT |
| | | FSSKTNTLVVRQRCGRPGGGVLLRYGSQLAPETFYRECDMQLFGPWGEIV |
| | | SPSLSPATSNAGGCRLFINVAPHARIAIHALATNMGAGTEGANASYILIR |
| | | DTHSLRTTAFHGQQVLYWESESSQAEMEFSEGFLKAQASLRGQYWTLQSW |
| | | VPEMQDPQSWKGKEGT |
| 13 | Human ADAMTS13 | LHLELLVAVGPDVFQAHQEDTERYVLTNLNIGAELLRDPSLGAQFRVHLV |
| | isoform 1, 2 | KMVILTEPEGAPNITANLTSSLLSVCGWSQTINPEDDTDPGHADLVLYIT |
| | metalloprotease | RFDLELPDGNRQVRGVTQLGGACSPTWSCLITEDTGFDLGVTIAHEIGHS |
| | domain | FGLEHDGAPGSGCGPSGHVMASDGAAPRAGLAWSPCSRRQLLSLLSAGRA |
| | | RCVWDPP |
| 14 | Human ADAMTS13 | RPQPGSAGHPPDAQPGLYYSANEQCRVAFGPKAVACTFAREHLDMCQALS |
| | isoform 1, 2 | CHTDPLDQSSCSRLLVPLLDGTECGVEKWCSKGRCRSLVELTPIAAV |
| | disintegrin-like | |
| | domain | |
| 15 | Human ADAMTS13 | HGRWSSWGPRSPCSRSCGGGVVTRRRQCNNPRPAFGGRACVGADLQAEMC |
| | isoform 1, 2, 3, 4 | NTQACE |
| | TSP-1 repeat 1 | |
| 16 | Human ADAMTS13 | KTQLEFMSQQCARTDGQPLRSSPGGASFYHWGAAVPHSQGDALCRHMCRA |
| | isoform 1, 2, 3, 4 | IGESFIMKRGDSFLDGTRCMPSGPREDGTLSLCVSGSCRTFGCDGRMDSQ |
| | cysteine-rich domain | QVWDRCQVCGGDNSTCS |
| 17 | Human ADAMTS13 | SPRKGSFTAGRAREYVTFLTVTPNLTSVYIANHRPLFTHLAVRIGGRYVV |
| | isoform 1, 2, 3 | AGKMSISPNTTYPSLLEDGRVEYRVALTEDRLPRLEEIRIWGPLQEDADI |
| | spacer domain | QVYRRYGEEYGNLTRPDITFTYFQPKPRQA |
| 18 | Human ADAMTS13 | PRQAWVWAAVRGPCSVSCGAGLRWVNYSCLDQARKELVETVQCQGSQQP |
| | isoform 1, 2, 3, 4 | |
| | TSP-1 repeat 2 | |
| 19 | Human ADAMTS13 | CPPYWAVGDFGPCSASCGGGLRERPVRCVEAQGSLLKTLPPARCRAGAQQ |
| | isoform 1, 2, 3 TSP-1 | PAVALETCNPQPCP |
| | repeat 3 | |
| 20 | Human ADAMTS13 | WEVSEPSSCTSAGGAGLALENETCVPGADGLEAPVTEGPGSVDEKLPAPE |
| | isoform 1, 2, 3 TSP-1 | PC |
| | repeat 4 | |
| 21 | Human ADAMTS13 | VWTPAAGSCSVSCGRGLMELRFLCMDSALRVPVQEELCGLASKPGSRREV |
| | isoform 1, 2, 3 TSP-1 | CQAVP |
| | repeat 5 | |
| 22 | Human ADAMTS13 | CPARWQYKLAACSVSCGRGVVRRILYCARAHGEDDGEEILLDTQCQGLPR |
| | isoform 1, 2, 3 TSP-1 | PEPQEACSLEP |
| | repeat 6 | |
| 23 | Human ADAMTS13 | CPPRWKVMSLGPCSASCGLGTARRSVACVQLDQGQDVEVDEAACAALVRP |
| | isoform 1, 2, 3 TSP-1 | EASVPCL |
| | repeat 7 | |
| 24 | Human ADAMTS13 | CTYRWHVGTWMECSVSCGDGIQRRRDTCLGPQAQAPVPADFCQHLPKPVT |
| | isoform 1, 2, 3 TSP-1 | VRGCWAGPCV |
| | repeat 8 | |
| 25 | Human ADAMTS13 | CGRQHLEPTGTIDMRGPGQADCAVAIGRPLGEVVTLRVLESSLNCSAGDM |
| | isoform 1, 2, 3 CUB | LLLWGRLTWRKMCRKLLDMTFSSKTNTLVVRQRCGRPGGGVLLRYGSQLA |
| | domain 1 | PETFYRE |
| 26 | Human ADAMTS13 | CDMQLFGPWGEIVSPSLSPATSNAGGCRLFINVAPHARIAIHALATNMGA |
| | isoform 1, 2, 3 CUB | GTEGANASYILIRDTHSLRTTAFHGQQVLYWESESSQAEMEFSEGFLKAQ |
| | domain 2 | ASLRGQYWTLQSWVPEMQDPQSWKGKEGT |
| 27 | Human VWF isoform | MIPARFAGVLLALALILPGTLCAEGTRGRSSTARCSLFGSDFVNTFDGSM |
| | 1 (UniProt: P04275- | YSFAGYCSYLLAGGCQKRSFSIIGDFQNGKRVSLSVYLGEFFDIHLFVNG |
| | 1, v4) | TVTQGDQRVSMPYASKGLYLETEAGYYKLSGEAYGFVARIDGSGNFQVLL |
| | | SDRYFNKTCGLCGNFNIFAEDDFMTQEGTLTSDPYDFANSWALSSGEQWC |
| | | ERASPPSSSCNISSGEMQKGLWEQCQLLKSTSVFARCHPLVDPEPFVALC |
| | | EKTLCECAGGLECACPALLEYARTCAQEGMVLYGWTDHSACSPVCPAGME |
| | | YRQCVSPCARTCQSLHINEMCQERCVDGCSCPEGQLLDEGLCVESTECPC |
| | | VHSGKRYPPGTSLSRDCNTCICRNSQWICSNEECPGECLVTGQSHFKSFD |
| | | NRYFTFSGICQYLLARDCQDHSFSIVIETVQCADDRDAVCTRSVTVRLPG |
| | | LHNSLVKLKHGAGVAMDGQDVQLPLLKGDLRIQHTVTASVRLSYGEDLQM |
| | | DWDGRGRLLVKLSPVYAGKTCGLCGNYNGNQGDDFLTPSGLAEPRVEDFG |
| | | NAWKLHGDCQDLQKQHSDPCALNPRMTRFSEEACAVLTSPTFEACHRAVS |
| | | PLPYLRNCRYDVCSCSDGRECLCGALASYAAACAGRGVRVAWREPGRCEL |
| | | NCPKGQVYLQCGTPCNLTCRSLSYPDEECNEACLEGCFCPPGLYMDERGD |
| | | CVPKAQCPCYYDGEIFQPEDIFSDHHTMCYCEDGFMHCTMSGVPGSLLPD |
| | | AVLSSPLSHRSKRSLSCRPPMVKLVCPADNLRAEGLECTKTCQNYDLECM |
| | | SMGCVSGCLCPPGMVRHENRCVALERCPCFHQGKEYAPGETVKIGCNTCV |
| | | CQDRKWNCTDHVCDATCSTIGMAHYLTFDGLKYLFPGECQYVLVQDYCGS |
| | | NPGTFRILVGNKGCSHPSVKCKKRVTILVEGGEIELFDGEVNVKRPMKDE |
| | | THFEVVESGRYIILLLGKALSVVWDRHLSISVVLKQTYQEKVCGLCGNFD |
| | | GIQNNDLTSSNLQVEEDPVDFGNSWKVSSQCADTRKVPLDSSPATCHNNI |
| | | MKQTMVDSSCRILTSDVFQDCNKLVDPEPYLDVCIYDTCSCESIGDCACF |
| | | CDTIAAYAHVCAQHGKVVTWRTATLCPQSCEERNLRENGYECEWRYNSCA |
| | | PACQVTCQHPEPLACPVQCVEGCHAHCPPGKILDELLQTCVDPEDCPVCE |
| | | VAGRRFASGKKVTLNPSDPEHCQICHCDVVNLTCEACQEPGGLVVPPTDA |
| | | PVSPTTLYVEDISEPPLHDFYCSRLLDLVFLLDGSSRLSEAEFEVLKAFV |
| | | VDMMERLRISQKWVRVAVVEYHDGSHAYIGLKDRKRPSELRRIASQVKYA |
| | | GSQVASTSEVLKYTLFQIFSKIDRPEASRITLLLMASQEPQRMSRNFVRY |
| | | VQGLKKKKVIVIPVGIGPHANLKQIRLIEKQAPENKAFVLSSVDELEQQR |
| | | DEIVSYLCDLAPEAPPPTLPPDMAQVTVGPGLLGVSTLGPKRNSMVLDVA |
| | | FVLEGSDKIGEADFNRSKEFMEEVIQRMDVGQDSIHVTVLQYSYMVTVEY |
| | | PFSEAQSKGDILQRVREIRYQGGNRTNTGLALRYLSDHSFLVSQGDREQA |
| | | PNLVYMVTGNPASDEIKRLPGDIQVVPIGVGPNANVQELERIGWPNAPIL |
| | | IQDFETLPREAPDLVLQRCCSGEGLQIPTLSPAPDCSQPLDVILLLDGSS |
| | | SFPASYFDEMKSFAKAFISKANIGPRLTQVSVLQYGSITTIDVPWNVVPE |
| | | KAHLLSLVDVMQREGGPSQIGDALGFAVRYLTSEMHGARPGASKAVVILV |
| | | TDVSVDSVDAAADAARSNRVTVFPIGIGDRYDAAQLRILAGPAGDSNVVK |
| | | LQRIEDLPTMVTLGNSFLHKLCSGFVRICMDEDGNEKRPGDVWTLPDQCH |
| | | TVTCQPDGQTLLKSHRVNCDRGLRPSCPNSQSPVKVEETCGCRWTCPCVC |
| | | TGSSTRHIVTFDGQNFKLTGSCSYVLFQNKEQDLEVILHNGACSPGARQG |
| | | CMKSIEVKHSALSVELHSDMEVTVNGRLVSVPYVGGNMEVNVYGAIMHEV |
| | | RFNHLGHIFTFTPQNNEFQLQLSPKTFASKTYGLCGICDENGANDFMLRD |
| | | GTVTTDWKTLVQEWTVQRPGQTCQPILEEQCLVPDSSHCQVLLLPLFAEC |
| | | HKVLAPATFYAICQQDSCHQEQVCEVIASYAHLCRTNGVCVDWRTPDFCA |
| | | MSCPPSLVYNHCEHGCPRHCDGNVSSCGDHPSEGCFCPPDKVMLEGSCVP |
| | | EEACTQCIGEDGVQHQFLEAWVPDHQPCQICTCLSGRKVNCTTQPCPTAK |
| | | APTCGLCEVARLRQNADQCCPEYECVCDPVSCDLPPVPHCERGLQPTLTN |
| | | PGECRPNFTCACRKEECKRVSPPSCPPHRLPTLRKTQCCDEYECACNCVN |
| | | STVSCPLGYLASTATNDCGCTTTTCLPDKVCVHRSTIYPVGQFWEEGCDV |
| | | CTCTDMEDAVMGLRVAQCSQKPCEDSCRSGFTYVLHEGECCGRCLPSACE |
| | | VVTGSPRGDSQSSWKSVGSQWASPENPCLINECVRVKEEVFIQQRNVSCP |
| | | QLEVPVCPSGFQLSCKTSACCPSCRCERMEACMLNGTVIGPGKTVMIDVC |
| | | TTCRCMVQVGVISGFKLECRKTTCNPCPLGYKEENNTGECCGRCLPTACT |
| | | IQLRGGQIMTLKRDETLQDGCDTHFCKVNERGEYFWEKRVTGCPPFDEHK |
| | | CLAEGGKIMKIPGTCCDTCEEPECNDITARLQYVKVGSCKSEVEVDIHYC |
| | | QGKCASKAMYSIDINDVQDQCSCCSPTRTEPMQVALHCTNGSVVYHEVLN |
| | | AMECKCSPRKCSK |
| 28 | Human VWF isoform | MGAQDEEEGIQDLDGLLVFDKIVEVTLLNLPWYNEETEGQRGEMTAPKSP |
| | 2 (UniProt: P04275- | RAKIRGTLCAEGTRGRSSTARCSLFGSDFVNTFDGSMYSFAGYCSYLLAG |
| | 2) | GCQKRSFSIIGDFQNGKRVSLSVYLGEFFDIHLFVNGTVTQGDQRVSMPY |
| | | ASKGLYLETEAGYYKLSGEAYGFVARIDGSGNFQVLLSDRYFNKTCGLCG |
| | | NFNIFAEDDFMTQEGTLTSDPYDFANSWALSSGEQWCERASPPSSSCNIS |
| | | SGEMQKEEPECNDITARLQYVKVGSCKSEVEVDIHYCQGKCASKAMYSID |
| | | INDVQDQCSCCSPTRTEPMQVALHCTNGSVVYHEVLNAMECKCSPRKCSK |
| | | I |
| 29 | Human VWF isoform | MIPARFAGVLLALALILPGTLC |
| | 1 signal peptide | |
| | (positions 1 to 22 of | |
| | UniProt: P04275-1, | |
| | v4) | |
| 30 | Human VWF isoform | AEGTRGRSSTARCSLFGSDFVNTFDGSMYSFAGYCSYLLAGGCQKRSFSI |
| | 1 lacking signal | IGDFQNGKRVSLSVYLGEFFDIHLFVNGTVTQGDQRVSMPYASKGLYLET |
| | peptide (positions 23 | EAGYYKLSGEAYGFVARIDGSGNFQVLLSDRYFNKTCGLCGNFNIFAEDD |
| | to 22 of UniProt: | FMTQEGTLTSDPYDFANSWALSSGEQWCERASPPSSSCNISSGEMQKGLW |
| | P04275-1, v4) | EQCQLLKSTSVFARCHPLVDPEPFVALCEKTLCECAGGLECACPALLEYA |
| | | RTCAQEGMVLYGWTDHSACSPVCPAGMEYRQCVSPCARTCQSLHINEMCQ |
| | | ERCVDGCSCPEGQLLDEGLCVESTECPCVHSGKRYPPGTSLSRDCNTCIC |
| | | RNSQWICSNEECPGECLVTGQSHFKSFDNRYFTFSGICQYLLARDCQDHS |
| | | FSIVIETVQCADDRDAVCTRSVTVRLPGLHNSLVKLKHGAGVAMDGQDVQ |
| | | LPLLKGDLRIQHTVTASVRLSYGEDLQMDWDGRGRLLVKLSPVYAGKTCG |
| | | LCGNYNGNQGDDFLTPSGLAEPRVEDFGNAWKLHGDCQDLQKQHSDPCAL |
| | | NPRMTRFSEEACAVLTSPTFEACHRAVSPLPYLRNCRYDVCSCSDGRECL |
| | | CGALASYAAACAGRGVRVAWREPGRCELNCPKGQVYLQCGTPCNLTCRSL |
| | | SYPDEECNEACLEGCFCPPGLYMDERGDCVPKAQCPCYYDGEIFQPEDIF |
| | | SDHHTMCYCEDGFMHCTMSGVPGSLLPDAVLSSPLSHRSKRSLSCRPPMV |
| | | KLVCPADNLRAEGLECTKTCQNYDLECMSMGCVSGCLCPPGMVRHENRCV |
| | | ALERCPCFHQGKEYAPGETVKIGCNTCVCQDRKWNCTDHVCDATCSTIGM |
| | | AHYLTFDGLKYLFPGECQYVLVQDYCGSNPGTFRILVGNKGCSHPSVKCK |
| | | KRVTILVEGGEIELFDGEVNVKRPMKDETHFEVVESGRYIILLLGKALSV |
| | | VWDRHLSISVVLKQTYQEKVCGLCGNFDGIQNNDLTSSNLQVEEDPVDFG |
| | | NSWKVSSQCADTRKVPLDSSPATCHNNIMKQTMVDSSCRILTSDVFQDCN |
| | | KLVDPEPYLDVCIYDTCSCESIGDCACFCDTIAAYAHVCAQHGKVVTWRT |
| | | ATLCPQSCEERNLRENGYECEWRYNSCAPACQVTCQHPEPLACPVQCVEG |
| | | CHAHCPPGKILDELLQTCVDPEDCPVCEVAGRRFASGKKVTLNPSDPEHC |
| | | QICHCDVVNLTCEACQEPGGLVVPPTDAPVSPTTLYVEDISEPPLHDFYC |
| | | SRLLDLVFLLDGSSRLSEAEFEVLKAFVVDMMERLRISQKWVRVAVVEYH |
| | | DGSHAYIGLKDRKRPSELRRIASQVKYAGSQVASTSEVLKYTLFQIFSKI |
| | | DRPEASRITLLLMASQEPQRMSRNFVRYVQGLKKKKVIVIPVGIGPHANL |
| | | KQIRLIEKQAPENKAFVLSSVDELEQQRDEIVSYLCDLAPEAPPPTLPPD |
| | | MAQVTVGPGLLGVSTLGPKRNSMVLDVAFVLEGSDKIGEADFNRSKEFME |
| | | EVIQRMDVGQDSIHVTVLQYSYMVTVEYPFSEAQSKGDILQRVREIRYQG |
| | | GNRTNTGLALRYLSDHSFLVSQGDREQAPNLVYMVTGNPASDEIKRLPGD |
| | | IQVVPIGVGPNANVQELERIGWPNAPILIQDFETLPREAPDLVLQRCCSG |
| | | EGLQIPTLSPAPDCSQPLDVILLLDGSSSFPASYFDEMKSFAKAFISKAN |
| | | IGPRLTQVSVLQYGSITTIDVPWNVVPEKAHLLSLVDVMQREGGPSQIGD |
| | | ALGFAVRYLTSEMHGARPGASKAVVILVTDVSVDSVDAAADAARSNRVTV |
| | | FPIGIGDRYDAAQLRILAGPAGDSNVVKLQRIEDLPTMVTLGNSFLHKLC |
| | | SGFVRICMDEDGNEKRPGDVWTLPDQCHTVTCQPDGQTLLKSHRVNCDRG |
| | | LRPSCPNSQSPVKVEETCGCRWTCPCVCTGSSTRHIVTFDGQNFKLTGSC |
| | | SYVLFQNKEQDLEVILHNGACSPGARQGCMKSIEVKHSALSVELHSDMEV |
| | | TVNGRLVSVPYVGGNMEVNVYGAIMHEVRFNHLGHIFTFTPQNNEFQLQL |
| | | SPKTFASKTYGLCGICDENGANDFMLRDGTVTTDWKTLVQEWTVQRPGQT |
| | | CQPILEEQCLVPDSSHCQVLLLPLFAECHKVLAPATFYAICQQDSCHQEQ |
| | | VCEVIASYAHLCRTNGVCVDWRTPDFCAMSCPPSLVYNHCEHGCPRHCDG |
| | | NVSSCGDHPSEGCFCPPDKVMLEGSCVPEEACTQCIGEDGVQHQFLEAWV |
| | | PDHQPCQICTCLSGRKVNCTTQPCPTAKAPTCGLCEVARLRQNADQCCPE |
| | | YECVCDPVSCDLPPVPHCERGLQPTLTNPGECRPNFTCACRKEECKRVSP |
| | | PSCPPHRLPTLRKTQCCDEYECACNCVNSTVSCPLGYLASTATNDCGCTT |
| | | TTCLPDKVCVHRSTIYPVGQFWEEGCDVCTCTDMEDAVMGLRVAQCSQKP |
| | | CEDSCRSGFTYVLHEGECCGRCLPSACEVVTGSPRGDSQSSWKSVGSQWA |
| | | SPENPCLINECVRVKEEVFIQQRNVSCPQLEVPVCPSGFQLSCKTSACCP |
| | | SCRCERMEACMLNGTVIGPGKTVMIDVCTTCRCMVQVGVISGFKLECRKT |
| | | TCNPCPLGYKEENNTGECCGRCLPTACTIQLRGGQIMTLKRDETLQDGCD |
| | | THFCKVNERGEYFWEKRVTGCPPFDEHKCLAEGGKIMKIPGTCCDTCEEP |
| | | ECNDITARLQYVKVGSCKSEVEVDIHYCQGKCASKAMYSIDINDVQDQCS |
| | | CCSPTRTEPMQVALHCTNGSVVYHEVLNAMECKCSPRKCSK |
| 31 | Human VWF antigen | AEGTRGRSSTARCSLFGSDFVNTFDGSMYSFAGYCSYLLAGGCQKRSFSI |
| | 2 | IGDFQNGKRVSLSVYLGEFFDIHLFVNGTVTQGDQRVSMPYASKGLYLET |
| | | EAGYYKLSGEAYGFVARIDGSGNFQVLLSDRYFNKTCGLCGNFNIFAEDD |
| | | FMTQEGTLTSDPYDFANSWALSSGEQWCERASPPSSSCNISSGEMQKGLW |
| | | EQCQLLKSTSVFARCHPLVDPEPFVALCEKTLCECAGGLECACPALLEYA |
| | | RTCAQEGMVLYGWTDHSACSPVCPAGMEYRQCVSPCARTCQSLHINEMCQ |
| | | ERCVDGCSCPEGQLLDEGLCVESTECPCVHSGKRYPPGTSLSRDCNTCIC |
| | | RNSQWICSNEECPGECLVTGQSHFKSFDNRYFTFSGICQYLLARDCQDHS |
| | | FSIVIETVQCADDRDAVCTRSVTVRLPGLHNSLVKLKHGAGVAMDGQDVQ |
| | | LPLLKGDLRIQHTVTASVRLSYGEDLQMDWDGRGRLLVKLSPVYAGKTCG |
| | | LCGNYNGNQGDDFLTPSGLAEPRVEDFGNAWKLHGDCQDLQKQHSDPCAL |
| | | NPRMTRFSEEACAVLTSPTFEACHRAVSPLPYLRNCRYDVCSCSDGRECL |
| | | CGALASYAAACAGRGVRVAWREPGRCELNCPKGQVYLQCGTPCNLTCRSL |
| | | SYPDEECNEACLEGCFCPPGLYMDERGDCVPKAQCPCYYDGEIFQPEDIF |
| | | SDHHTMCYCEDGFMHCTMSGVPGSLLPDAVLSSPLSHRSKR |
| 32 | Mature human VWF | SLSCRPPMVKLVCPADNLRAEGLECTKTCQNYDLECMSMGCVSGCLCPPG |
| | | MVRHENRCVALERCPCFHQGKEYAPGETVKIGCNTCVCQDRKWNCTDHVC |
| | | DATCSTIGMAHYLTFDGLKYLFPGECQYVLVQDYCGSNPGTFRILVGNKG |
| | | CSHPSVKCKKRVTILVEGGEIELFDGEVNVKRPMKDETHFEVVESGRYII |
| | | LLLGKALSVVWDRHLSISVVLKQTYQEKVCGLCGNFDGIQNNDLTSSNLQ |
| | | VEEDPVDFGNSWKVSSQCADTRKVPLDSSPATCHNNIMKQTMVDSSCRIL |
| | | TSDVFQDCNKLVDPEPYLDVCIYDTCSCESIGDCACFCDTIAAYAHVCAQ |
| | | HGKVVTWRTATLCPQSCEERNLRENGYECEWRYNSCAPACQVTCQHPEPL |
| | | ACPVQCVEGCHAHCPPGKILDELLQTCVDPEDCPVCEVAGRRFASGKKVT |
| | | LNPSDPEHCQICHCDVVNLTCEACQEPGGLVVPPTDAPVSPTTLYVEDIS |
| | | EPPLHDFYCSRLLDLVFLLDGSSRLSEAEFEVLKAFVVDMMERLRISQKW |
| | | VRVAVVEYHDGSHAYIGLKDRKRPSELRRIASQVKYAGSQVASTSEVLKY |
| | | TLFQIFSKIDRPEASRITLLLMASQEPQRMSRNFVRYVQGLKKKKVIVIP |
| | | VGIGPHANLKQIRLIEKQAPENKAFVLSSVDELEQQRDEIVSYLCDLAPE |
| | | APPPTLPPDMAQVTVGPGLLGVSTLGPKRNSMVLDVAFVLEGSDKIGEAD |
| | | FNRSKEFMEEVIQRMDVGQDSIHVTVLQYSYMVTVEYPFSEAQSKGDILQ |
| | | RVREIRYQGGNRTNTGLALRYLSDHSFLVSQGDREQAPNLVYMVTGNPAS |
| | | DEIKRLPGDIQVVPIGVGPNANVQELERIGWPNAPILIQDFETLPREAPD |
| | | LVLQRCCSGEGLQIPTLSPAPDCSQPLDVILLLDGSSSFPASYFDEMKSF |
| | | AKAFISKANIGPRLTQVSVLQYGSITTIDVPWNVVPEKAHLLSLVDVMQR |
| | | EGGPSQIGDALGFAVRYLTSEMHGARPGASKAVVILVTDVSVDSVDAAAD |
| | | AARSNRVTVFPIGIGDRYDAAQLRILAGPAGDSNVVKLQRIEDLPTMVTL |
| | | GNSFLHKLCSGFVRICMDEDGNEKRPGDVWTLPDQCHTVTCQPDGQTLLK |
| | | SHRVNCDRGLRPSCPNSQSPVKVEETCGCRWTCPCVCTGSSTRHIVTFDG |
| | | QNFKLTGSCSYVLFQNKEQDLEVILHNGACSPGARQGCMKSIEVKHSALS |
| | | VELHSDMEVTVNGRLVSVPYVGGNMEVNVYGAIMHEVRFNHLGHIFTFTP |
| | | QNNEFQLQLSPKTFASKTYGLCGICDENGANDFMLRDGTVTTDWKTLVQE |
| | | WTVQRPGQTCQPILEEQCLVPDSSHCQVLLLPLFAECHKVLAPATFYAIC |
| | | QQDSCHQEQVCEVIASYAHLCRTNGVCVDWRTPDFCAMSCPPSLVYNHCE |
| | | HGCPRHCDGNVSSCGDHPSEGCFCPPDKVMLEGSCVPEEACTQCIGEDGV |
| | | QHQFLEAWVPDHQPCQICTCLSGRKVNCTTQPCPTAKAPTCGLCEVARLR |
| | | QNADQCCPEYECVCDPVSCDLPPVPHCERGLQPTLTNPGECRPNFTCACR |
| | | KEECKRVSPPSCPPHRLPTLRKTQCCDEYECACNCVNSTVSCPLGYLAST |
| | | ATNDCGCTTTTCLPDKVCVHRSTIYPVGQFWEEGCDVCTCTDMEDAVMGL |
| | | RVAQCSQKPCEDSCRSGFTYVLHEGECCGRCLPSACEVVTGSPRGDSQSS |
| | | WKSVGSQWASPENPCLINECVRVKEEVFIQQRNVSCPQLEVPVCPSGFQL |
| | | SCKTSACCPSCRCERMEACMLNGTVIGPGKTVMIDVCTTCRCMVQVGVIS |
| | | GFKLECRKTTCNPCPLGYKEENNTGECCGRCLPTACTIQLRGGQIMTLKR |
| | | DETLQDGCDTHFCKVNERGEYFWEKRVTGCPPFDEHKCLAEGGKIMKIPG |
| | | TCCDTCEEPECNDITARLQYVKVGSCKSEVEVDIHYCQGKCASKAMYSID |
| | | INDVQDQCSCCSPTRTEPMQVALHCTNGSVVYHEVLNAMECKCSPRKCSK |
| 33 | Human VWF | RCSLFGSDFVNTFDGSMYSFAGYCSYLLAGGCQKRSFSIIGDFQNGKRVS |
| | VWFD1 | LSVYLGEFFDIHLFVNGTVTQGDQRVSMPYASKGLYLETEAGYYKLSGEA |
| | | YGFVARIDGSGNFQVLLSDRYFNKTCGLCGNFNIFAEDDFMTQEGTLTSD |
| | | PYDFANSWALSSGEQWCERASPPSSSCNISSGEMQKGLWEQCQLLKSTSV |
| | | FARCHPL |
| 34 | Human VWF TIL1 | CPAGMEYRQCVSPCARTCQSLHINEMCQERCVDGCSCPEGQLLDEGLCVE |
| | | STEC |
| 35 | Human VWF | ECLVTGQSHFKSFDNRYFTFSGICQYLLARDCQDHSFSIVIETVQCADDR |
| | VWFD2 | DAVCTRSVTVRLPGLHNSLVKLKHGAGVAMDGQDVQLPLLKGDLRIQHTV |
| | | TASVRLSYGEDLQMDWDGRGRLLVKLSPVYAGKTCGLCGNYNGNQGDDFL |
| | | TPSGLAEPRVEDFGNAWKLHGDCQDLQKQHSDPCALNPRMTRFSEEACAV |
| | | LTSPTFEACHRA |
| 36 | Human VWF TIL2 | CPKGQVYLQCGTPCNLTCRSLSYPDEECNEACLEGCFCPPGLYMDERGDC |
| | | VPKAQC |
| 37 | Human VWF TIL3 | CPADNLRAEGLECTKTCQNYDLECMSMGCVSGCLCPPGMVRHENRCVALE |
| | | RC |
| 38 | Human VWF | TCSTIGMAHYLTFDGLKYLFPGECQYVLVQDYCGSNPGTFRILVGNKGCS |
| | VWFD3 | HPSVKCKKRVTILVEGGEIELFDGEVNVKRPMKDETHFEVVESGRYIILL |
| | | LGKALSVVWDRHLSISVVLKQTYQEKVCGLCGNFDGIQNNDLTSSNLQVE |
| | | EDPVDFGNSWKVSSQCADTRKVPLDSSPATCHNNIMKQTMVDSSCRILTS |
| | | DVFQDCNKL |
| 39 | Human VWF TIL4 | YNSCAPACQVTCQHPEPLACPVQCVEGCHAHCPPGKILDELLQTCVDPED |
| | | C |
| 40 | Human VWF VWFA1 | DLVFLLDGSSRLSEAEFEVLKAFVVDMMERLRISQKWVRVAVVEYHDGSH |
| | | AYIGLKDRKRPSELRRIASQVKYAGSQVASTSEVLKYTLFQIFSKIDRPE |
| | | ASRITLLLMASQEPQRMSRNFVRYVQGLKKKKVIVIPVGIGPHANLKQIR |
| | | LIEKQAPENKAFVLSSVDELEQQRDEI |
| 41 | Human VWF VWFA2 | DVAFVLEGSDKIGEADFNRSKEFMEEVIQRMDVGQDSIHVTVLQYSYMVT |
| | | VEYPFSEAQSKGDILQRVREIRYQGGNRTNTGLALRYLSDHSFLVSQGDR |
| | | EQAPNLVYMVTGNPASDEIKRLPGDIQVVPIGVGPNANVQELERIGWPNA |
| | | PILIQDFETLPREAPDLV |
| 42 | Human VWF VWFA3 | DVILLLDGSSSFPASYFDEMKSFAKAFISKANIGPRLTQVSVLQYGSITT |
| | | IDVPWNVVPEKAHLLSLVDVMQREGGPSQIGDALGFAVRYLTSEMHGARP |
| | | GASKAVVILVTDVSVDSVDAAADAARSNRVTVFPIGIGDRYDAAQLRILA |
| | | GPAGDSNVVKLQRIEDLPTMVTLGNSFLHKL |
| 43 | Human VWF | VCTGSSTRHIVTFDGQNFKLTGSCSYVLFQNKEQDLEVILHNGACSPGAR |
| | VWFD4 | QGCMKSIEVKHSALSVELHSDMEVTVNGRLVSVPYVGGNMEVNVYGAIMH |
| | | EVRFNHLGHIFTFTPQNNEFQLQLSPKTFASKTYGLCGICDENGANDFML |
| | | RDGTVTTDWKTLVQEWTVQRPGQTCQPILEEQCLVPDSSHCQVLLLPLFA |
| | | ECHKV |
| 44 | Human VWF | TQCIGEDGVQHQFLEAWVPDHQPCQICTCLSGRKVNCTTQPCPTAKAPTC |
| | VWFC1 | GLCEVARLRQNADQCCPEYECVCD |
| 45 | Human VWF | KVCVHRSTIYPVGQFWEEGCDVCTCTDMEDAVMGLRVAQCSQKPCEDSCR |
| | VWFC2 | SGFTYVLHEGECCGRCL |
| 46 | Human VWF | EACMLNGTVIGPGKTVMIDVCTTCRCMVQVGVISGFKLECRKTTCNPCPL |
| | VWFC3 | GYKEENNTGECCGRCL |
| 47 | Human VWF isoform | CNDITARLQYVKVGSCKSEVEVDIHYCQGKCASKAMYSIDINDVQDQCSC |
| | 1, 2 CTCK | CSPTRTEPMQVALHCTNGSVVYHEVLNAMECKCSPRKCS |
| 48 | Human ADAMTS13 | VGQGTPSLVPHEEAAAPGRTTATPAGASLEWSQARGLLFSPAPQPRRLLP |
| | isoform 1 L3 region | GPQENSVQSS |
| 49 | Human ADAMTS13 | AAAPGRTTATPAGASLEWSQARGLLFSPAPQPRRLLPGP |
| | isoform 1 L3 variant | |
| | subregion | |
| 50 | Human ADAMTS13 | X₁X₂X₃X₄GRTTATX₅AGASLEWSQARGLLFSX₆AX₇QX₈RRLLX₉GX₁₀ |
| | variant L3 subregion | wherein X₁ = A, K, I, L, M or V, |
| | consensus 1 | X₂ = A, K, I, L, M or V, |
| | | X₃ = A, K, I, L, M or V, X₄ = P, K, I, L, |
| | | M or V, X₅ = P, K, I, L, M or V, |
| | | X₆ = P, K, I, L, M or V, |
| | | X₇ = P, K, I, L, M or V, X₈ = P, K, I, L, M |
| | | or V, X₉ = P, K, I, L, M or V and |
| | | X₁₀ = P, K, I, L, M or V |
| 51 | Human ADAMTS13 | VAAPGRTTATPAGASLEWSQARGLLFSPAPQPRRLLPGP |
| | A1144V L3 | |
| | subregion | |
| 52 | Human ADAMTS13 | AVAPGRTTATPAGASLEWSQARGLLFSPAPQPRRLLPGP |
| | A1145V L3 | |
| | subregion | |
| 53 | Human ADAMTS13 | AAVPGRTTATPAGASLEWSQARGLLFSPAPQPRRLLPGP |
| | A1146V L3 | |
| | subregion | |
| 54 | Human ADAMTS13 | AAAVGRTTATPAGASLEWSQARGLLFSPAPQPRRLLPGP |
| | P1147V L3 | |
| | subregion | |
| 55 | Human ADAMTS13 | AAAPGRTTATVAGASLEWSQARGLLFSPAPQPRRLLPGP |
| | P1154V L3 | |
| | subregion | |
| 56 | Human ADAMTS13 | AAAPGRTTATPAGASLEWSQARGLLFSVAPQPRRLLPGP |
| | P1171V L3 | |
| | subregion | |
| 57 | Human ADAMTS13 | AAAPGRTTATPAGASLEWSQARGLLFSPAVQPRRLLPGP |
| | P1173V L3 | |
| | subregion | |
| 58 | Human ADAMTS13 | AAAPGRTTATPAGASLEWSQARGLLFSPAPQVRRLLPGP |
| | P1175V L3 | |
| | subregion | |
| 59 | Human ADAMTS13 | AAAPGRTTATPAGASLEWSQARGLLFSPAPQPRRLLVGP |
| | P1180V L3 | |
| | subregion | |
| 60 | Human ADAMTS13 | AAAPGRTTATPAGASLEWSQARGLLFSPAPQPRRLLPGV |
| | P1182V L3 | |
| | subregion | |
| 61 | Mature ADAMTS13 | AAGGILHLELLVAVGPDVFQAHQEDTERYVLTNLNIGAELLRDPSLGAQF |
| | A1144V | RVHLVKMVILTEPEGAPNITANLTSSLLSVCGWSQTINPEDDTDPGHADL |
| | | VLYITRFDLELPDGNRQVRGVTQLGGACSPTWSCLITEDTGFDLGVTIAH |
| | | EIGHSFGLEHDGAPGSGCGPSGHVMASDGAAPRAGLAWSPCSRRQLLSLL |
| | | SAGRARCVWDPPRPQPGSAGHPPDAQPGLYYSANEQCRVAFGPKAVACTF |
| | | AREHLDMCQALSCHTDPLDQSSCSRLLVPLLDGTECGVEKWCSKGRCRSL |
| | | VELTPIAAVHGRWSSWGPRSPCSRSCGGGVVTRRRQCNNPRPAFGGRACV |
| | | GADLQAEMCNTQACEKTQLEFMSQQCARTDGQPLRSSPGGASFYHWGAAV |
| | | PHSQGDALCRHMCRAIGESFIMKRGDSFLDGTRCMPSGPREDGTLSLCVS |
| | | GSCRTFGCDGRMDSQQVWDRCQVCGGDNSTCSPRKGSFTAGRAREYVTFL |
| | | TVTPNLTSVYIANHRPLFTHLAVRIGGRYVVAGKMSISPNTTYPSLLEDG |
| | | RVEYRVALTEDRLPRLEEIRIWGPLQEDADIQVYRRYGEEYGNLTRPDIT |
| | | FTYFQPKPRQAWVWAAVRGPCSVSCGAGLRWVNYSCLDQARKELVETVQC |
| | | QGSQQPPAWPEACVLEPCPPYWAVGDFGPCSASCGGGLRERPVRCVEAQG |
| | | SLLKTLPPARCRAGAQQPAVALETCNPQPCPARWEVSEPSSCTSAGGAGL |
| | | ALENETCVPGADGLEAPVTEGPGSVDEKLPAPEPCVGMSCPPGWGHLDAT |
| | | SAGEKAPSPWGSIRTGAQAAHVWTPAAGSCSVSCGRGLMELRFLCMDSAL |
| | | RVPVQEELCGLASKPGSRREVCQAVPCPARWQYKLAACSVSCGRGVVRRI |
| | | LYCARAHGEDDGEEILLDTQCQGLPRPEPQEACSLEPCPPRWKVMSLGPC |
| | | SASCGLGTARRSVACVQLDQGQDVEVDEAACAALVRPEASVPCLIADCTY |
| | | RWHVGTWMECSVSCGDGIQRRRDTCLGPQAQAPVPADFCQHLPKPVTVRG |
| | | CWAGPCVGQGTPSLVPHEEVAAPGRTTATPAGASLEWSQARGLLFSPAPQ |
| | | PRRLLPGPQENSVQSSACGRQHLEPTGTIDMRGPGQADCAVAIGRPLGEV |
| | | VTLRVLESSLNCSAGDMLLLWGRLTWRKMCRKLLDMTFSSKTNTLVVRQR |
| | | CGRPGGGVLLRYGSQLAPETFYRECDMQLFGPWGEIVSPSLSPATSNAGG |
| | | CRLFINVAPHARIAIHALATNMGAGTEGANASYILIRDTHSLRTTAFHGQ |
| | | QVLYWESESSQAEMEFSEGFLKAQASLRGQYWTLQSWVPEMQDPQSWKGK |
| | | EGT |
| 62 | Mature ADAMTS13 | AAGGILHLELLVAVGPDVFQAHQEDTERYVLTNLNIGAELLRDPSLGAQF |
| | A1145V | RVHLVKMVILTEPEGAPNITANLTSSLLSVCGWSQTINPEDDTDPGHADL |
| | | VLYITRFDLELPDGNRQVRGVTQLGGACSPTWSCLITEDTGFDLGVTIAH |
| | | EIGHSFGLEHDGAPGSGCGPSGHVMASDGAAPRAGLAWSPCSRRQLLSLL |
| | | SAGRARCVWDPPRPQPGSAGHPPDAQPGLYYSANEQCRVAFGPKAVACTF |
| | | AREHLDMCQALSCHTDPLDQSSCSRLLVPLLDGTECGVEKWCSKGRCRSL |
| | | VELTPIAAVHGRWSSWGPRSPCSRSCGGGVVTRRRQCNNPRPAFGGRACV |
| | | GADLQAEMCNTQACEKTQLEFMSQQCARTDGQPLRSSPGGASFYHWGAAV |
| | | PHSQGDALCRHMCRAIGESFIMKRGDSFLDGTRCMPSGPREDGTLSLCVS |
| | | GSCRTFGCDGRMDSQQVWDRCQVCGGDNSTCSPRKGSFTAGRAREYVTFL |
| | | TVTPNLTSVYIANHRPLFTHLAVRIGGRYVVAGKMSISPNTTYPSLLEDG |
| | | RVEYRVALTEDRLPRLEEIRIWGPLQEDADIQVYRRYGEEYGNLTRPDIT |
| | | FTYFQPKPRQAWVWAAVRGPCSVSCGAGLRWVNYSCLDQARKELVETVQC |
| | | QGSQQPPAWPEACVLEPCPPYWAVGDFGPCSASCGGGLRERPVRCVEAQG |
| | | SLLKTLPPARCRAGAQQPAVALETCNPQPCPARWEVSEPSSCTSAGGAGL |
| | | ALENETCVPGADGLEAPVTEGPGSVDEKLPAPEPCVGMSCPPGWGHLDAT |
| | | SAGEKAPSPWGSIRTGAQAAHVWTPAAGSCSVSCGRGLMELRFLCMDSAL |
| | | RVPVQEELCGLASKPGSRREVCQAVPCPARWQYKLAACSVSCGRGVVRRI |
| | | LYCARAHGEDDGEEILLDTQCQGLPRPEPQEACSLEPCPPRWKVMSLGPC |
| | | SASCGLGTARRSVACVQLDQGQDVEVDEAACAALVRPEASVPCLIADCTY |
| | | RWHVGTWMECSVSCGDGIQRRRDTCLGPQAQAPVPADFCQHLPKPVTVRG |
| | | CWAGPCVGQGTPSLVPHEEAVAPGRTTATPAGASLEWSQARGLLFSPAPQ |
| | | PRRLLPGPQENSVQSSACGRQHLEPTGTIDMRGPGQADCAVAIGRPLGEV |
| | | VTLRVLESSLNCSAGDMLLLWGRLTWRKMCRKLLDMTFSSKTNTLVVRQR |
| | | CGRPGGGVLLRYGSQLAPETFYRECDMQLFGPWGEIVSPSLSPATSNAGG |
| | | CRLFINVAPHARIAIHALATNMGAGTEGANASYILIRDTHSLRTTAFHGQ |
| | | QVLYWESESSQAEMEFSEGFLKAQASLRGQYWTLQSWVPEMQDPQSWKGK |
| | | EGT |
| 63 | Mature ADAMTS13 | AAGGILHLELLVAVGPDVFQAHQEDTERYVLTNLNIGAELLRDPSLGAQF |
| | A1146V | RVHLVKMVILTEPEGAPNITANLTSSLLSVCGWSQTINPEDDTDPGHADL |
| | | VLYITRFDLELPDGNRQVRGVTQLGGACSPTWSCLITEDTGFDLGVTIAH |
| | | EIGHSFGLEHDGAPGSGCGPSGHVMASDGAAPRAGLAWSPCSRRQLLSLL |
| | | SAGRARCVWDPPRPQPGSAGHPPDAQPGLYYSANEQCRVAFGPKAVACTF |
| | | AREHLDMCQALSCHTDPLDQSSCSRLLVPLLDGTECGVEKWCSKGRCRSL |
| | | VELTPIAAVHGRWSSWGPRSPCSRSCGGGVVTRRRQCNNPRPAFGGRACV |
| | | GADLQAEMCNTQACEKTQLEFMSQQCARTDGQPLRSSPGGASFYHWGAAV |
| | | PHSQGDALCRHMCRAIGESFIMKRGDSFLDGTRCMPSGPREDGTLSLCVS |
| | | GSCRTFGCDGRMDSQQVWDRCQVCGGDNSTCSPRKGSFTAGRAREYVTFL |
| | | TVTPNLTSVYIANHRPLFTHLAVRIGGRYVVAGKMSISPNTTYPSLLEDG |
| | | RVEYRVALTEDRLPRLEEIRIWGPLQEDADIQVYRRYGEEYGNLTRPDIT |
| | | FTYFQPKPRQAWVWAAVRGPCSVSCGAGLRWVNYSCLDQARKELVETVQC |
| | | QGSQQPPAWPEACVLEPCPPYWAVGDFGPCSASCGGGLRERPVRCVEAQG |
| | | SLLKTLPPARCRAGAQQPAVALETCNPQPCPARWEVSEPSSCTSAGGAGL |
| | | ALENETCVPGADGLEAPVTEGPGSVDEKLPAPEPCVGMSCPPGWGHLDAT |
| | | SAGEKAPSPWGSIRTGAQAAHVWTPAAGSCSVSCGRGLMELRFLCMDSAL |
| | | RVPVQEELCGLASKPGSRREVCQAVPCPARWQYKLAACSVSCGRGVVRRI |
| | | LYCARAHGEDDGEEILLDTQCQGLPRPEPQEACSLEPCPPRWKVMSLGPC |
| | | SASCGLGTARRSVACVQLDQGQDVEVDEAACAALVRPEASVPCLIADCTY |
| | | RWHVGTWMECSVSCGDGIQRRRDTCLGPQAQAPVPADFCQHLPKPVTVRG |
| | | CWAGPCVGQGTPSLVPHEEAAVPGRTTATPAGASLEWSQARGLLFSPAPQ |
| | | PRRLLPGPQENSVQSSACGRQHLEPTGTIDMRGPGQADCAVAIGRPLGEV |
| | | VTLRVLESSLNCSAGDMLLLWGRLTWRKMCRKLLDMTFSSKTNTLVVRQR |
| | | CGRPGGGVLLRYGSQLAPETFYRECDMQLFGPWGEIVSPSLSPATSNAGG |
| | | CRLFINVAPHARIAIHALATNMGAGTEGANASYILIRDTHSLRTTAFHGQ |
| | | QVLYWESESSQAEMEFSEGFLKAQASLRGQYWTLQSWVPEMQDPQSWKGK |
| | | EGT |
| 64 | Mature ADAMTS13 | AAGGILHLELLVAVGPDVFQAHQEDTERYVLTNLNIGAELLRDPSLGAQF |
| | P1147V | RVHLVKMVILTEPEGAPNITANLTSSLLSVCGWSQTINPEDDTDPGHADL |
| | | VLYITRFDLELPDGNRQVRGVTQLGGACSPTWSCLITEDTGFDLGVTIAH |
| | | EIGHSFGLEHDGAPGSGCGPSGHVMASDGAAPRAGLAWSPCSRRQLLSLL |
| | | SAGRARCVWDPPRPQPGSAGHPPDAQPGLYYSANEQCRVAFGPKAVACTF |
| | | AREHLDMCQALSCHTDPLDQSSCSRLLVPLLDGTECGVEKWCSKGRCRSL |
| | | VELTPIAAVHGRWSSWGPRSPCSRSCGGGVVTRRRQCNNPRPAFGGRACV |
| | | GADLQAEMCNTQACEKTQLEFMSQQCARTDGQPLRSSPGGASFYHWGAAV |
| | | PHSQGDALCRHMCRAIGESFIMKRGDSFLDGTRCMPSGPREDGTLSLCVS |
| | | GSCRTFGCDGRMDSQQVWDRCQVCGGDNSTCSPRKGSFTAGRAREYVTFL |
| | | TVTPNLTSVYIANHRPLFTHLAVRIGGRYVVAGKMSISPNTTYPSLLEDG |
| | | RVEYRVALTEDRLPRLEEIRIWGPLQEDADIQVYRRYGEEYGNLTRPDIT |
| | | FTYFQPKPRQAWVWAAVRGPCSVSCGAGLRWVNYSCLDQARKELVETVQC |
| | | QGSQQPPAWPEACVLEPCPPYWAVGDFGPCSASCGGGLRERPVRCVEAQG |
| | | SLLKTLPPARCRAGAQQPAVALETCNPQPCPARWEVSEPSSCTSAGGAGL |
| | | ALENETCVPGADGLEAPVTEGPGSVDEKLPAPEPCVGMSCPPGWGHLDAT |
| | | SAGEKAPSPWGSIRTGAQAAHVWTPAAGSCSVSCGRGLMELRFLCMDSAL |
| | | RVPVQEELCGLASKPGSRREVCQAVPCPARWQYKLAACSVSCGRGVVRRI |
| | | LYCARAHGEDDGEEILLDTQCQGLPRPEPQEACSLEPCPPRWKVMSLGPC |
| | | SASCGLGTARRSVACVQLDQGQDVEVDEAACAALVRPEASVPCLIADCTY |
| | | RWHVGTWMECSVSCGDGIQRRRDTCLGPQAQAPVPADFCQHLPKPVTVRG |
| | | CWAGPCVGQGTPSLVPHEEAAAVGRTTATPAGASLEWSQARGLLFSPAPQ |
| | | PRRLLPGPQENSVQSSACGRQHLEPTGTIDMRGPGQADCAVAIGRPLGEV |
| | | VTLRVLESSLNCSAGDMLLLWGRLTWRKMCRKLLDMTFSSKTNTLVVRQR |
| | | CGRPGGGVLLRYGSQLAPETFYRECDMQLFGPWGEIVSPSLSPATSNAGG |
| | | CRLFINVAPHARIAIHALATNMGAGTEGANASYILIRDTHSLRTTAFHGQ |
| | | QVLYWESESSQAEMEFSEGFLKAQASLRGQYWTLQSWVPEMQDPQSWKGK |
| | | EGT |
| 65 | Mature ADAMTS13 | AAGGILHLELLVAVGPDVFQAHQEDTERYVLTNLNIGAELLRDPSLGAQF |
| | P1154V | RVHLVKMVILTEPEGAPNITANLTSSLLSVCGWSQTINPEDDTDPGHADL |
| | | VLYITRFDLELPDGNRQVRGVTQLGGACSPTWSCLITEDTGFDLGVTIAH |
| | | EIGHSFGLEHDGAPGSGCGPSGHVMASDGAAPRAGLAWSPCSRRQLLSLL |
| | | SAGRARCVWDPPRPQPGSAGHPPDAQPGLYYSANEQCRVAFGPKAVACTF |
| | | AREHLDMCQALSCHTDPLDQSSCSRLLVPLLDGTECGVEKWCSKGRCRSL |
| | | VELTPIAAVHGRWSSWGPRSPCSRSCGGGVVTRRRQCNNPRPAFGGRACV |
| | | GADLQAEMCNTQACEKTQLEFMSQQCARTDGQPLRSSPGGASFYHWGAAV |
| | | PHSQGDALCRHMCRAIGESFIMKRGDSFLDGTRCMPSGPREDGTLSLCVS |
| | | GSCRTFGCDGRMDSQQVWDRCQVCGGDNSTCSPRKGSFTAGRAREYVTFL |
| | | TVTPNLTSVYIANHRPLFTHLAVRIGGRYVVAGKMSISPNTTYPSLLEDG |
| | | RVEYRVALTEDRLPRLEEIRIWGPLQEDADIQVYRRYGEEYGNLTRPDIT |
| | | FTYFQPKPRQAWVWAAVRGPCSVSCGAGLRWVNYSCLDQARKELVETVQC |
| | | QGSQQPPAWPEACVLEPCPPYWAVGDFGPCSASCGGGLRERPVRCVEAQG |
| | | SLLKTLPPARCRAGAQQPAVALETCNPQPCPARWEVSEPSSCTSAGGAGL |
| | | ALENETCVPGADGLEAPVTEGPGSVDEKLPAPEPCVGMSCPPGWGHLDAT |
| | | SAGEKAPSPWGSIRTGAQAAHVWTPAAGSCSVSCGRGLMELRFLCMDSAL |
| | | RVPVQEELCGLASKPGSRREVCQAVPCPARWQYKLAACSVSCGRGVVRRI |
| | | LYCARAHGEDDGEEILLDTQCQGLPRPEPQEACSLEPCPPRWKVMSLGPC |
| | | SASCGLGTARRSVACVQLDQGQDVEVDEAACAALVRPEASVPCLIADCTY |
| | | RWHVGTWMECSVSCGDGIQRRRDTCLGPQAQAPVPADFCQHLPKPVTVRG |
| | | CWAGPCVGQGTPSLVPHEEAAAPGRTTATVAGASLEWSQARGLLFSPAPQ |
| | | PRRLLPGPQENSVQSSACGRQHLEPTGTIDMRGPGQADCAVAIGRPLGEV |
| | | VTLRVLESSLNCSAGDMLLLWGRLTWRKMCRKLLDMTFSSKTNTLVVRQR |
| | | CGRPGGGVLLRYGSQLAPETFYRECDMQLFGPWGEIVSPSLSPATSNAGG |
| | | CRLFINVAPHARIAIHALATNMGAGTEGANASYILIRDTHSLRTTAFHGQ |
| | | QVLYWESESSQAEMEFSEGFLKAQASLRGQYWTLQSWVPEMQDPQSWKGK |
| | | EGT |
| 66 | Mature ADAMTS13 | AAGGILHLELLVAVGPDVFQAHQEDTERYVLTNLNIGAELLRDPSLGAQF |
| | P1171V | RVHLVKMVILTEPEGAPNITANLTSSLLSVCGWSQTINPEDDTDPGHADL |
| | | VLYITRFDLELPDGNRQVRGVTQLGGACSPTWSCLITEDTGFDLGVTIAH |
| | | EIGHSFGLEHDGAPGSGCGPSGHVMASDGAAPRAGLAWSPCSRRQLLSLL |
| | | SAGRARCVWDPPRPQPGSAGHPPDAQPGLYYSANEQCRVAFGPKAVACTF |
| | | AREHLDMCQALSCHTDPLDQSSCSRLLVPLLDGTECGVEKWCSKGRCRSL |
| | | VELTPIAAVHGRWSSWGPRSPCSRSCGGGVVTRRRQCNNPRPAFGGRACV |
| | | GADLQAEMCNTQACEKTQLEFMSQQCARTDGQPLRSSPGGASFYHWGAAV |
| | | PHSQGDALCRHMCRAIGESFIMKRGDSFLDGTRCMPSGPREDGTLSLCVS |
| | | GSCRTFGCDGRMDSQQVWDRCQVCGGDNSTCSPRKGSFTAGRAREYVTFL |
| | | TVTPNLTSVYIANHRPLFTHLAVRIGGRYVVAGKMSISPNTTYPSLLEDG |
| | | RVEYRVALTEDRLPRLEEIRIWGPLQEDADIQVYRRYGEEYGNLTRPDIT |
| | | FTYFQPKPRQAWVWAAVRGPCSVSCGAGLRWVNYSCLDQARKELVETVQC |
| | | QGSQQPPAWPEACVLEPCPPYWAVGDFGPCSASCGGGLRERPVRCVEAQG |
| | | SLLKTLPPARCRAGAQQPAVALETCNPQPCPARWEVSEPSSCTSAGGAGL |
| | | ALENETCVPGADGLEAPVTEGPGSVDEKLPAPEPCVGMSCPPGWGHLDAT |
| | | SAGEKAPSPWGSIRTGAQAAHVWTPAAGSCSVSCGRGLMELRFLCMDSAL |
| | | RVPVQEELCGLASKPGSRREVCQAVPCPARWQYKLAACSVSCGRGVVRRI |
| | | LYCARAHGEDDGEEILLDTQCQGLPRPEPQEACSLEPCPPRWKVMSLGPC |
| | | SASCGLGTARRSVACVQLDQGQDVEVDEAACAALVRPEASVPCLIADCTY |
| | | RWHVGTWMECSVSCGDGIQRRRDTCLGPQAQAPVPADFCQHLPKPVTVRG |
| | | CWAGPCVGQGTPSLVPHEEAAAPGRTTATPAGASLEWSQARGLLFSVAPQ |
| | | PRRLLPGPQENSVQSSACGRQHLEPTGTIDMRGPGQADCAVAIGRPLGEV |
| | | VTLRVLESSLNCSAGDMLLLWGRLTWRKMCRKLLDMTFSSKTNTLVVRQR |
| | | CGRPGGGVLLRYGSQLAPETFYRECDMQLFGPWGEIVSPSLSPATSNAGG |
| | | CRLFINVAPHARIAIHALATNMGAGTEGANASYILIRDTHSLRTTAFHGQ |
| | | QVLYWESESSQAEMEFSEGFLKAQASLRGQYWTLQSWVPEMQDPQSWKGK |
| | | EGT |
| 67 | Mature ADAMTS13 | AAGGILHLELLVAVGPDVFQAHQEDTERYVLTNLNIGAELLRDPSLGAQF |
| | P1173V | RVHLVKMVILTEPEGAPNITANLTSSLLSVCGWSQTINPEDDTDPGHADL |
| | | VLYITRFDLELPDGNRQVRGVTQLGGACSPTWSCLITEDTGFDLGVTIAH |
| | | EIGHSFGLEHDGAPGSGCGPSGHVMASDGAAPRAGLAWSPCSRRQLLSLL |
| | | SAGRARCVWDPPRPQPGSAGHPPDAQPGLYYSANEQCRVAFGPKAVACTF |
| | | AREHLDMCQALSCHTDPLDQSSCSRLLVPLLDGTECGVEKWCSKGRCRSL |
| | | VELTPIAAVHGRWSSWGPRSPCSRSCGGGVVTRRRQCNNPRPAFGGRACV |
| | | GADLQAEMCNTQACEKTQLEFMSQQCARTDGQPLRSSPGGASFYHWGAAV |
| | | PHSQGDALCRHMCRAIGESFIMKRGDSFLDGTRCMPSGPREDGTLSLCVS |
| | | GSCRTFGCDGRMDSQQVWDRCQVCGGDNSTCSPRKGSFTAGRAREYVTFL |
| | | TVTPNLTSVYIANHRPLFTHLAVRIGGRYVVAGKMSISPNTTYPSLLEDG |
| | | RVEYRVALTEDRLPRLEEIRIWGPLQEDADIQVYRRYGEEYGNLTRPDIT |
| | | FTYFQPKPRQAWVWAAVRGPCSVSCGAGLRWVNYSCLDQARKELVETVQC |
| | | QGSQQPPAWPEACVLEPCPPYWAVGDFGPCSASCGGGLRERPVRCVEAQG |
| | | SLLKTLPPARCRAGAQQPAVALETCNPQPCPARWEVSEPSSCTSAGGAGL |
| | | ALENETCVPGADGLEAPVTEGPGSVDEKLPAPEPCVGMSCPPGWGHLDAT |
| | | SAGEKAPSPWGSIRTGAQAAHVWTPAAGSCSVSCGRGLMELRFLCMDSAL |
| | | RVPVQEELCGLASKPGSRREVCQAVPCPARWQYKLAACSVSCGRGVVRRI |
| | | LYCARAHGEDDGEEILLDTQCQGLPRPEPQEACSLEPCPPRWKVMSLGPC |
| | | SASCGLGTARRSVACVQLDQGQDVEVDEAACAALVRPEASVPCLIADCTY |
| | | RWHVGTWMECSVSCGDGIQRRRDTCLGPQAQAPVPADFCQHLPKPVTVRG |
| | | CWAGPCVGQGTPSLVPHEEAAAPGRTTATPAGASLEWSQARGLLFSPAVQ |
| | | PRRLLPGPQENSVQSSACGRQHLEPTGTIDMRGPGQADCAVAIGRPLGEV |
| | | VTLRVLESSLNCSAGDMLLLWGRLTWRKMCRKLLDMTFSSKTNTLVVRQR |
| | | CGRPGGGVLLRYGSQLAPETFYRECDMQLFGPWGEIVSPSLSPATSNAGG |
| | | CRLFINVAPHARIAIHALATNMGAGTEGANASYILIRDTHSLRTTAFHGQ |
| | | QVLYWESESSQAEMEFSEGFLKAQASLRGQYWTLQSWVPEMQDPQSWKGK |
| | | EGT |
| 68 | Mature ADAMTS13 | AAGGILHLELLVAVGPDVFQAHQEDTERYVLTNLNIGAELLRDPSLGAQF |
| | P1175V | RVHLVKMVILTEPEGAPNITANLTSSLLSVCGWSQTINPEDDTDPGHADL |
| | | VLYITRFDLELPDGNRQVRGVTQLGGACSPTWSCLITEDTGFDLGVTIAH |
| | | EIGHSFGLEHDGAPGSGCGPSGHVMASDGAAPRAGLAWSPCSRRQLLSLL |
| | | SAGRARCVWDPPRPQPGSAGHPPDAQPGLYYSANEQCRVAFGPKAVACTF |
| | | AREHLDMCQALSCHTDPLDQSSCSRLLVPLLDGTECGVEKWCSKGRCRSL |
| | | VELTPIAAVHGRWSSWGPRSPCSRSCGGGVVTRRRQCNNPRPAFGGRACV |
| | | GADLQAEMCNTQACEKTQLEFMSQQCARTDGQPLRSSPGGASFYHWGAAV |
| | | PHSQGDALCRHMCRAIGESFIMKRGDSFLDGTRCMPSGPREDGTLSLCVS |
| | | GSCRTFGCDGRMDSQQVWDRCQVCGGDNSTCSPRKGSFTAGRAREYVTFL |
| | | TVTPNLTSVYIANHRPLFTHLAVRIGGRYVVAGKMSISPNTTYPSLLEDG |
| | | RVEYRVALTEDRLPRLEEIRIWGPLQEDADIQVYRRYGEEYGNLTRPDIT |
| | | FTYFQPKPRQAWVWAAVRGPCSVSCGAGLRWVNYSCLDQARKELVETVQC |
| | | QGSQQPPAWPEACVLEPCPPYWAVGDFGPCSASCGGGLRERPVRCVEAQG |
| | | SLLKTLPPARCRAGAQQPAVALETCNPQPCPARWEVSEPSSCTSAGGAGL |
| | | ALENETCVPGADGLEAPVTEGPGSVDEKLPAPEPCVGMSCPPGWGHLDAT |
| | | SAGEKAPSPWGSIRTGAQAAHVWTPAAGSCSVSCGRGLMELRFLCMDSAL |
| | | RVPVQEELCGLASKPGSRREVCQAVPCPARWQYKLAACSVSCGRGVVRRI |
| | | LYCARAHGEDDGEEILLDTQCQGLPRPEPQEACSLEPCPPRWKVMSLGPC |
| | | SASCGLGTARRSVACVQLDQGQDVEVDEAACAALVRPEASVPCLIADCTY |
| | | RWHVGTWMECSVSCGDGIQRRRDTCLGPQAQAPVPADFCQHLPKPVTVRG |
| | | CWAGPCVGQGTPSLVPHEEAAAPGRTTATPAGASLEWSQARGLLFSPAPQ |
| | | VRRLLPGPQENSVQSSACGRQHLEPTGTIDMRGPGQADCAVAIGRPLGEV |
| | | VTLRVLESSLNCSAGDMLLLWGRLTWRKMCRKLLDMTFSSKTNTLVVRQR |
| | | CGRPGGGVLLRYGSQLAPETFYRECDMQLFGPWGEIVSPSLSPATSNAGG |
| | | CRLFINVAPHARIAIHALATNMGAGTEGANASYILIRDTHSLRTTAFHGQ |
| | | QVLYWESESSQAEMEFSEGFLKAQASLRGQYWTLQSWVPEMQDPQSWKGK |
| | | EGT |
| 69 | Mature ADAMTS13 | AAGGILHLELLVAVGPDVFQAHQEDTERYVLTNLNIGAELLRDPSLGAQF |
| | P1180V | RVHLVKMVILTEPEGAPNITANLTSSLLSVCGWSQTINPEDDTDPGHADL |
| | | VLYITRFDLELPDGNRQVRGVTQLGGACSPTWSCLITEDTGFDLGVTIAH |
| | | EIGHSFGLEHDGAPGSGCGPSGHVMASDGAAPRAGLAWSPCSRRQLLSLL |
| | | SAGRARCVWDPPRPQPGSAGHPPDAQPGLYYSANEQCRVAFGPKAVACTF |
| | | AREHLDMCQALSCHTDPLDQSSCSRLLVPLLDGTECGVEKWCSKGRCRSL |
| | | VELTPIAAVHGRWSSWGPRSPCSRSCGGGVVTRRRQCNNPRPAFGGRACV |
| | | GADLQAEMCNTQACEKTQLEFMSQQCARTDGQPLRSSPGGASFYHWGAAV |
| | | PHSQGDALCRHMCRAIGESFIMKRGDSFLDGTRCMPSGPREDGTLSLCVS |
| | | GSCRTFGCDGRMDSQQVWDRCQVCGGDNSTCSPRKGSFTAGRAREYVTFL |
| | | TVTPNLTSVYIANHRPLFTHLAVRIGGRYVVAGKMSISPNTTYPSLLEDG |
| | | RVEYRVALTEDRLPRLEEIRIWGPLQEDADIQVYRRYGEEYGNLTRPDIT |
| | | FTYFQPKPRQAWVWAAVRGPCSVSCGAGLRWVNYSCLDQARKELVETVQC |
| | | QGSQQPPAWPEACVLEPCPPYWAVGDFGPCSASCGGGLRERPVRCVEAQG |
| | | SLLKTLPPARCRAGAQQPAVALETCNPQPCPARWEVSEPSSCTSAGGAGL |
| | | ALENETCVPGADGLEAPVTEGPGSVDEKLPAPEPCVGMSCPPGWGHLDAT |
| | | SAGEKAPSPWGSIRTGAQAAHVWTPAAGSCSVSCGRGLMELRFLCMDSAL |
| | | RVPVQEELCGLASKPGSRREVCQAVPCPARWQYKLAACSVSCGRGVVRRI |
| | | LYCARAHGEDDGEEILLDTQCQGLPRPEPQEACSLEPCPPRWKVMSLGPC |
| | | SASCGLGTARRSVACVQLDQGQDVEVDEAACAALVRPEASVPCLIADCTY |
| | | RWHVGTWMECSVSCGDGIQRRRDTCLGPQAQAPVPADFCQHLPKPVTVRG |
| | | CWAGPCVGQGTPSLVPHEEAAAPGRTTATPAGASLEWSQARGLLFSPAPQ |
| | | PRRLLVGPQENSVQSSACGRQHLEPTGTIDMRGPGQADCAVAIGRPLGEV |
| | | VTLRVLESSLNCSAGDMLLLWGRLTWRKMCRKLLDMTFSSKTNTLVVRQR |
| | | CGRPGGGVLLRYGSQLAPETFYRECDMQLFGPWGEIVSPSLSPATSNAGG |
| | | CRLFINVAPHARIAIHALATNMGAGTEGANASYILIRDTHSLRTTAFHGQ |
| | | QVLYWESESSQAEMEFSEGFLKAQASLRGQYWTLQSWVPEMQDPQSWKGK |
| | | EGT |
| 70 | Mature ADAMTS13 | AAGGILHLELLVAVGPDVFQAHQEDTERYVLTNLNIGAELLRDPSLGAQF |
| | P1182V | RVHLVKMVILTEPEGAPNITANLTSSLLSVCGWSQTINPEDDTDPGHADL |
| | | VLYITRFDLELPDGNRQVRGVTQLGGACSPTWSCLITEDTGFDLGVTIAH |
| | | EIGHSFGLEHDGAPGSGCGPSGHVMASDGAAPRAGLAWSPCSRRQLLSLL |
| | | SAGRARCVWDPPRPQPGSAGHPPDAQPGLYYSANEQCRVAFGPKAVACTF |
| | | AREHLDMCQALSCHTDPLDQSSCSRLLVPLLDGTECGVEKWCSKGRCRSL |
| | | VELTPIAAVHGRWSSWGPRSPCSRSCGGGVVTRRRQCNNPRPAFGGRACV |
| | | GADLQAEMCNTQACEKTQLEFMSQQCARTDGQPLRSSPGGASFYHWGAAV |
| | | PHSQGDALCRHMCRAIGESFIMKRGDSFLDGTRCMPSGPREDGTLSLCVS |
| | | GSCRTFGCDGRMDSQQVWDRCQVCGGDNSTCSPRKGSFTAGRAREYVTFL |
| | | TVTPNLTSVYIANHRPLFTHLAVRIGGRYVVAGKMSISPNTTYPSLLEDG |
| | | RVEYRVALTEDRLPRLEEIRIWGPLQEDADIQVYRRYGEEYGNLTRPDIT |
| | | FTYFQPKPRQAWVWAAVRGPCSVSCGAGLRWVNYSCLDQARKELVETVQC |
| | | QGSQQPPAWPEACVLEPCPPYWAVGDFGPCSASCGGGLRERPVRCVEAQG |
| | | SLLKTLPPARCRAGAQQPAVALETCNPQPCPARWEVSEPSSCTSAGGAGL |
| | | ALENETCVPGADGLEAPVTEGPGSVDEKLPAPEPCVGMSCPPGWGHLDAT |
| | | SAGEKAPSPWGSIRTGAQAAHVWTPAAGSCSVSCGRGLMELRFLCMDSAL |
| | | RVPVQEELCGLASKPGSRREVCQAVPCPARWQYKLAACSVSCGRGVVRRI |
| | | LYCARAHGEDDGEEILLDTQCQGLPRPEPQEACSLEPCPPRWKVMSLGPC |
| | | SASCGLGTARRSVACVQLDQGQDVEVDEAACAALVRPEASVPCLIADCTY |
| | | RWHVGTWMECSVSCGDGIQRRRDTCLGPQAQAPVPADFCQHLPKPVTVRG |
| | | CWAGPCVGQGTPSLVPHEEAAAPGRTTATPAGASLEWSQARGLLFSPAPQ |
| | | PRRLLPGVQENSVQSSACGRQHLEPTGTIDMRGPGQADCAVAIGRPLGEV |
| | | VTLRVLESSLNCSAGDMLLLWGRLTWRKMCRKLLDMTFSSKTNTLVVRQR |
| | | CGRPGGGVLLRYGSQLAPETFYRECDMQLFGPWGEIVSPSLSPATSNAGG |
| | | CRLFINVAPHARIAIHALATNMGAGTEGANASYILIRDTHSLRTTAFHGQ |
| | | QVLYWESESSQAEMEFSEGFLKAQASLRGQYWTLQSWVPEMQDPQSWKGK |
| | | EGT |
| 71 | Mature ADAMTS13 | AAGGILHLELLVAVGPDVFQAHQEDTERYVLTNLNIGAELLRDPSLGAQF |
| | R568K/F592Y/R660 | RVHLVKMVILTEPEGAPNITANLTSSLLSVCGWSQTINPEDDTDPGHADL |
| | K/Y661F/Y665F | VLYITRFDLELPDGNRQVRGVTQLGGACSPTWSCLITEDTGFDLGVTIAH |
| | variant | EIGHSFGLEHDGAPGSGCGPSGHVMASDGAAPRAGLAWSPCSRRQLLSLL |
| | | SAGRARCVWDPPRPQPGSAGHPPDAQPGLYYSANEQCRVAFGPKAVACTF |
| | | AREHLDMCQALSCHTDPLDQSSCSRLLVPLLDGTECGVEKWCSKGRCRSL |
| | | VELTPIAAVHGRWSSWGPRSPCSRSCGGGVVTRRRQCNNPRPAFGGRACV |
| | | GADLQAEMCNTQACEKTQLEFMSQQCARTDGQPLRSSPGGASFYHWGAAV |
| | | PHSQGDALCRHMCRAIGESFIMKRGDSFLDGTRCMPSGPREDGTLSLCVS |
| | | GSCRTFGCDGRMDSQQVWDRCQVCGGDNSTCSPRKGSFTAGRAKEYVTFL |
| | | TVTPNLTSVYIANHRPLYTHLAVRIGGRYVVAGKMSISPNTTYPSLLEDG |
| | | RVEYRVALTEDRLPRLEEIRIWGPLQEDADIQVYRKFGEEFGNLTRPDIT |
| | | FTYFQPKPRQAWVWAAVRGPCSVSCGAGLRWVNYSCLDQARKELVETVQC |
| | | QGSQQPPAWPEACVLEPCPPYWAVGDFGPCSASCGGGLRERPVRCVEAQG |
| | | SLLKTLPPARCRAGAQQPAVALETCNPQPCPARWEVSEPSSCTSAGGAGL |
| | | ALENETCVPGADGLEAPVTEGPGSVDEKLPAPEPCVGMSCPPGWGHLDAT |
| | | SAGEKAPSPWGSIRTGAQAAHVWTPAAGSCSVSCGRGLMELRFLCMDSAL |
| | | RVPVQEELCGLASKPGSRREVCQAVPCPARWQYKLAACSVSCGRGVVRRI |
| | | LYCARAHGEDDGEEILLDTQCQGLPRPEPQEACSLEPCPPRWKVMSLGPC |
| | | SASCGLGTARRSVACVQLDQGQDVEVDEAACAALVRPEASVPCLIADCTY |
| | | RWHVGTWMECSVSCGDGIQRRRDTCLGPQAQAPVPADFCQHLPKPVTVRG |
| | | CWAGPCVGQGTPSLVPHEEAAAPGRTTATPAGASLEWSQARGLLFSPAPQ |
| | | PRRLLPGPQENSVQSSACGRQHLEPTGTIDMRGPGQADCAVAIGRPLGEV |
| | | VTLRVLESSLNCSAGDMLLLWGRLTWRKMCRKLLDMTFSSKTNTLVVRQR |
| | | CGRPGGGVLLRYGSQLAPETFYRECDMQLFGPWGEIVSPSLSPATSNAGG |
| | | CRLFINVAPHARIAIHALATNMGAGTEGANASYILIRDTHSLRTTAFHGQ |
| | | QVLYWESESSQAEMEFSEGFLKAQASLRGQYWTLQSWVPEMQDPQSWKGK |
| | | EGT |
| 72 | Exemplified wildtype | MHQRHPRARCPPLCVAGILACGFLLGCWGPSHFQQSCLQALEPQAVSSYL |
| | ADAMTS13 | SPGAPLKGRPPSPGFQRQRQRQRRAAGGILHLELLVAVGPDVFQAHQEDT |
| | | ERYVLTNLNIGAELLRDPSLGAQFRVHLVKMVILTEPEGAPNITANLTSS |
| | | LLSVCGWSQTINPEDDTDPGHADLVLYITRFDLELPDGNRQVRGVTQLGG |
| | | ACSPTWSCLITEDTGFDLGVTIAHEIGHSFGLEHDGAPGSGCGPSGHVMA |
| | | SDGAAPRAGLAWSPCSRRQLLSLLSAGRARCVWDPPRPQPGSAGHPPDAQ |
| | | PGLYYSANEQCRVAFGPKAVACTFAREHLDMCQALSCHTDPLDQSSCSRL |
| | | LVPLLDGTECGVEKWCSKGRCRSLVELTPIAAVHGRWSSWGPRSPCSRSC |
| | | GGGVVTRRRQCNNPRPAFGGRACVGADLQAEMCNTQACEKTQLEFMSQQC |
| | | ARTDGQPLRSSPGGASFYHWGAAVPHSQGDALCRHMCRAIGESFIMKRGD |
| | | SFLDGTRCMPSGPREDGTLSLCVSGSCRTFGCDGRMDSQQVWDRCQVCGG |
| | | DNSTCSPRKGSFTAGRAREYVTFLTVTPNLTSVYIANHRPLFTHLAVRIG |
| | | GRYVVAGKMSISPNTTYPSLLEDGRVEYRVALTEDRLPRLEEIRIWGPLQ |
| | | EDADIQVYRRYGEEYGNLTRPDITFTYFQPKPRQAWVWAAVRGPCSVSCG |
| | | AGLRWVNYSCLDQARKELVETVQCQGSQQPPAWPEACVLEPCPPYWAVGD |
| | | FGPCSASCGGGLRERPVRCVEAQGSLLKTLPPARCRAGAQQPAVALETCN |
| | | PQPCPARWEVSEPSSCTSAGGAGLALENETCVPGADGLEAPVTEGPGSVD |
| | | EKLPAPEPCVGMSCPPGWGHLDATSAGEKAPSPWGSIRTGAQAAHVWTPA |
| | | AGSCSVSCGRGLMELRFLCMDSALRVPVQEELCGLASKPGSRREVCQAVP |
| | | CPARWQYKLAACSVSCGRGVVRRILYCARAHGEDDGEEILLDTQCQGLPR |
| | | PEPQEACSLEPCPPRWKVMSLGPCSASCGLGTARRSVACVQLDQGQDVEV |
| | | DEAACAALVRPEASVPCLIADCTYRWHVGTWMECSVSCGDGIQRRRDTCL |
| | | GPQAQAPVPADFCQHLPKPVTVRGCWAGPCVGQGTPSLVPHEEAAAPGRT |
| | | TATPAGASLEWSQARGLLFSPAPQPRRLLPGPQENSVQSSACGRQHLEPT |
| | | GTIDMRGPGQADCAVAIGRPLGEVVTLRVLESSLNCSAGDMLLLWGRLTW |
| | | RKMCRKLLDMTFSSKTNTLVVRQRCGRPGGGVLLRYGSQLAPETFYRECD |
| | | MQLFGPWGEIVSPSLSPATSNAGGCRLFINVAPHARIAIHALATNMGAGT |
| | | EGANASYILIRDTHSLRTTAFHGQQVLYWESESSQAEMEFSEGFLKAQAS |
| | | LRGQYWTLQSWVPEMQDPQSWKGKEGTSRGPFEQKLISEEDLNMHTGHHH |
| | | HHH |
| 73 | Exemplified | MHQRHPRARCPPLCVAGILACGFLLGCWGPSHFQQSCLQALEPQAVSSYL |
| | ADAMTS13 | SPGAPLKGRPPSPGFQRQRQRQRRAAGGILHLELLVAVGPDVFQAHQEDT |
| | R568K/F592Y/R660 | ERYVLTNLNIGAELLRDPSLGAQFRVHLVKMVILTEPEGAPNITANLTSS |
| | K/Y661F/Y665F | LLSVCGWSQTINPEDDTDPGHADLVLYITRFDLELPDGNRQVRGVTQLGG |
| | variant | ACSPTWSCLITEDTGFDLGVTIAHEIGHSFGLEHDGAPGSGCGPSGHVMA |
| | | SDGAAPRAGLAWSPCSRRQLLSLLSAGRARCVWDPPRPQPGSAGHPPDAQ |
| | | PGLYYSANEQCRVAFGPKAVACTFAREHLDMCQALSCHTDPLDQSSCSRL |
| | | LVPLLDGTECGVEKWCSKGRCRSLVELTPIAAVHGRWSSWGPRSPCSRSC |
| | | GGGVVTRRRQCNNPRPAFGGRACVGADLQAEMCNTQACEKTQLEFMSQQC |
| | | ARTDGQPLRSSPGGASFYHWGAAVPHSQGDALCRHMCRAIGESFIMKRGD |
| | | SFLDGTRCMPSGPREDGTLSLCVSGSCRTFGCDGRMDSQQVWDRCQVCGG |
| | | DNSTCSPRKGSFTAGRAKEYVTFLTVTPNLTSVYIANHRPLYTHLAVRIG |
| | | GRYVVAGKMSISPNTTYPSLLEDGRVEYRVALTEDRLPRLEEIRIWGPLQ |
| | | EDADIQVYRKFGEEFGNLTRPDITFTYFQPKPRQAWVWAAVRGPCSVSCG |
| | | AGLRWVNYSCLDQARKELVETVQCQGSQQPPAWPEACVLEPCPPYWAVGD |
| | | FGPCSASCGGGLRERPVRCVEAQGSLLKTLPPARCRAGAQQPAVALETCN |
| | | PQPCPARWEVSEPSSCTSAGGAGLALENETCVPGADGLEAPVTEGPGSVD |
| | | EKLPAPEPCVGMSCPPGWGHLDATSAGEKAPSPWGSIRTGAQAAHVWTPA |
| | | AGSCSVSCGRGLMELRFLCMDSALRVPVQEELCGLASKPGSRREVCQAVP |
| | | CPARWQYKLAACSVSCGRGVVRRILYCARAHGEDDGEEILLDTQCQGLPR |
| | | PEPQEACSLEPCPPRWKVMSLGPCSASCGLGTARRSVACVQLDQGQDVEV |
| | | DEAACAALVRPEASVPCLIADCTYRWHVGTWMECSVSCGDGIQRRRDTCL |
| | | GPQAQAPVPADFCQHLPKPVTVRGCWAGPCVGQGTPSLVPHEEAAAPGRT |
| | | TATPAGASLEWSQARGLLFSPAPQPRRLLPGPQENSVQSSACGRQHLEPT |
| | | GTIDMRGPGQADCAVAIGRPLGEVVTLRVLESSLNCSAGDMLLLWGRLTW |
| | | RKMCRKLLDMTFSSKTNTLVVRQRCGRPGGGVLLRYGSQLAPETFYRECD |
| | | MQLFGPWGEIVSPSLSPATSNAGGCRLFINVAPHARIAIHALATNMGAGT |
| | | EGANASYILIRDTHSLRTTAFHGQQVLYWESESSQAEMEFSEGFLKAQAS |
| | | LRGQYWTLQSWVPEMQDPQSWKGKEGTSRGPFEQKLISEEDLNMHTGHHH |
| | | HHH |
| 74 | Exemplified A1144V | MHQRHPRARCPPLCVAGILACGFLLGCWGPSHFQQSCLQALEPQAVSSYL |
| | variant | SPGAPLKGRPPSPGFQRQRQRQRRAAGGILHLELLVAVGPDVFQAHQEDT |
| | | ERYVLTNLNIGAELLRDPSLGAQFRVHLVKMVILTEPEGAPNITANLTSS |
| | | LLSVCGWSQTINPEDDTDPGHADLVLYITRFDLELPDGNRQVRGVTQLGG |
| | | ACSPTWSCLITEDTGFDLGVTIAHEIGHSFGLEHDGAPGSGCGPSGHVMA |
| | | SDGAAPRAGLAWSPCSRRQLLSLLSAGRARCVWDPPRPQPGSAGHPPDAQ |
| | | PGLYYSANEQCRVAFGPKAVACTFAREHLDMCQALSCHTDPLDQSSCSRL |
| | | LVPLLDGTECGVEKWCSKGRCRSLVELTPIAAVHGRWSSWGPRSPCSRSC |
| | | GGGVVTRRRQCNNPRPAFGGRACVGADLQAEMCNTQACEKTQLEFMSQQC |
| | | ARTDGQPLRSSPGGASFYHWGAAVPHSQGDALCRHMCRAIGESFIMKRGD |
| | | SFLDGTRCMPSGPREDGTLSLCVSGSCRTFGCDGRMDSQQVWDRCQVCGG |
| | | DNSTCSPRKGSFTAGRAREYVTFLTVTPNLTSVYIANHRPLFTHLAVRIG |
| | | GRYVVAGKMSISPNTTYPSLLEDGRVEYRVALTEDRLPRLEEIRIWGPLQ |
| | | EDADIQVYRRYGEEYGNLTRPDITFTYFQPKPRQAWVWAAVRGPCSVSCG |
| | | AGLRWVNYSCLDQARKELVETVQCQGSQQPPAWPEACVLEPCPPYWAVGD |
| | | FGPCSASCGGGLRERPVRCVEAQGSLLKTLPPARCRAGAQQPAVALETCN |
| | | PQPCPARWEVSEPSSCTSAGGAGLALENETCVPGADGLEAPVTEGPGSVD |
| | | EKLPAPEPCVGMSCPPGWGHLDATSAGEKAPSPWGSIRTGAQAAHVWTPA |
| | | AGSCSVSCGRGLMELRFLCMDSALRVPVQEELCGLASKPGSRREVCQAVP |
| | | CPARWQYKLAACSVSCGRGVVRRILYCARAHGEDDGEEILLDTQCQGLPR |
| | | PEPQEACSLEPCPPRWKVMSLGPCSASCGLGTARRSVACVQLDQGQDVEV |
| | | DEAACAALVRPEASVPCLIADCTYRWHVGTWMECSVSCGDGIQRRRDTCL |
| | | GPQAQAPVPADFCQHLPKPVTVRGCWAGPCVGQGTPSLVPHEEVAAPGRT |
| | | TATPAGASLEWSQARGLLFSPAPQPRRLLPGPQENSVQSSACGRQHLEPT |
| | | GTIDMRGPGQADCAVAIGRPLGEVVTLRVLESSLNCSAGDMLLLWGRLTW |
| | | RKMCRKLLDMTFSSKTNTLVVRQRCGRPGGGVLLRYGSQLAPETFYRECD |
| | | MQLFGPWGEIVSPSLSPATSNAGGCRLFINVAPHARIAIHALATNMGAGT |
| | | EGANASYILIRDTHSLRTTAFHGQQVLYWESESSQAEMEFSEGFLKAQAS |
| | | LRGQYWTLQSWVPEMQDPQSWKGKEGTSRGPFEQKLISEEDLNMHTGHHH |
| | | HHH |
| 75 | Exemplified A1145V | MHQRHPRARCPPLCVAGILACGFLLGCWGPSHFQQSCLQALEPQAVSSYL |
| | variant | SPGAPLKGRPPSPGFQRQRQRQRRAAGGILHLELLVAVGPDVFQAHQEDT |
| | | ERYVLTNLNIGAELLRDPSLGAQFRVHLVKMVILTEPEGAPNITANLTSS |
| | | LLSVCGWSQTINPEDDTDPGHADLVLYITRFDLELPDGNRQVRGVTQLGG |
| | | ACSPTWSCLITEDTGFDLGVTIAHEIGHSFGLEHDGAPGSGCGPSGHVMA |
| | | SDGAAPRAGLAWSPCSRRQLLSLLSAGRARCVWDPPRPQPGSAGHPPDAQ |
| | | PGLYYSANEQCRVAFGPKAVACTFAREHLDMCQALSCHTDPLDQSSCSRL |
| | | LVPLLDGTECGVEKWCSKGRCRSLVELTPIAAVHGRWSSWGPRSPCSRSC |
| | | GGGVVTRRRQCNNPRPAFGGRACVGADLQAEMCNTQACEKTQLEFMSQQC |
| | | ARTDGQPLRSSPGGASFYHWGAAVPHSQGDALCRHMCRAIGESFIMKRGD |
| | | SFLDGTRCMPSGPREDGTLSLCVSGSCRTFGCDGRMDSQQVWDRCQVCGG |
| | | DNSTCSPRKGSFTAGRAREYVTFLTVTPNLTSVYIANHRPLFTHLAVRIG |
| | | GRYVVAGKMSISPNTTYPSLLEDGRVEYRVALTEDRLPRLEEIRIWGPLQ |
| | | EDADIQVYRRYGEEYGNLTRPDITFTYFQPKPRQAWVWAAVRGPCSVSCG |
| | | AGLRWVNYSCLDQARKELVETVQCQGSQQPPAWPEACVLEPCPPYWAVGD |
| | | FGPCSASCGGGLRERPVRCVEAQGSLLKTLPPARCRAGAQQPAVALETCN |
| | | PQPCPARWEVSEPSSCTSAGGAGLALENETCVPGADGLEAPVTEGPGSVD |
| | | EKLPAPEPCVGMSCPPGWGHLDATSAGEKAPSPWGSIRTGAQAAHVWTPA |
| | | AGSCSVSCGRGLMELRFLCMDSALRVPVQEELCGLASKPGSRREVCQAVP |
| | | CPARWQYKLAACSVSCGRGVVRRILYCARAHGEDDGEEILLDTQCQGLPR |
| | | PEPQEACSLEPCPPRWKVMSLGPCSASCGLGTARRSVACVQLDQGQDVEV |
| | | DEAACAALVRPEASVPCLIADCTYRWHVGTWMECSVSCGDGIQRRRDTCL |
| | | GPQAQAPVPADFCQHLPKPVTVRGCWAGPCVGQGTPSLVPHEEAVAPGRT |
| | | TATPAGASLEWSQARGLLFSPAPQPRRLLPGPQENSVQSSACGRQHLEPT |
| | | GTIDMRGPGQADCAVAIGRPLGEVVTLRVLESSLNCSAGDMLLLWGRLTW |
| | | RKMCRKLLDMTFSSKTNTLVVRQRCGRPGGGVLLRYGSQLAPETFYRECD |
| | | MQLFGPWGEIVSPSLSPATSNAGGCRLFINVAPHARIAIHALATNMGAGT |
| | | EGANASYILIRDTHSLRTTAFHGQQVLYWESESSQAEMEFSEGFLKAQAS |
| | | LRGQYWTLQSWVPEMQDPQSWKGKEGTSRGPFEQKLISEEDLNMHTGHHH |
| | | HHH |
| 76 | Exemplified A1146V | MHQRHPRARCPPLCVAGILACGFLLGCWGPSHFQQSCLQALEPQAVSSYL |
| | variant | SPGAPLKGRPPSPGFQRQRQRQRRAAGGILHLELLVAVGPDVFQAHQEDT |
| | | ERYVLTNLNIGAELLRDPSLGAQFRVHLVKMVILTEPEGAPNITANLTSS |
| | | LLSVCGWSQTINPEDDTDPGHADLVLYITRFDLELPDGNRQVRGVTQLGG |
| | | ACSPTWSCLITEDTGFDLGVTIAHEIGHSFGLEHDGAPGSGCGPSGHVMA |
| | | SDGAAPRAGLAWSPCSRRQLLSLLSAGRARCVWDPPRPQPGSAGHPPDAQ |
| | | PGLYYSANEQCRVAFGPKAVACTFAREHLDMCQALSCHTDPLDQSSCSRL |
| | | LVPLLDGTECGVEKWCSKGRCRSLVELTPIAAVHGRWSSWGPRSPCSRSC |
| | | GGGVVTRRRQCNNPRPAFGGRACVGADLQAEMCNTQACEKTQLEFMSQQC |
| | | ARTDGQPLRSSPGGASFYHWGAAVPHSQGDALCRHMCRAIGESFIMKRGD |
| | | SFLDGTRCMPSGPREDGTLSLCVSGSCRTFGCDGRMDSQQVWDRCQVCGG |
| | | DNSTCSPRKGSFTAGRAREYVTFLTVTPNLTSVYIANHRPLFTHLAVRIG |
| | | GRYVVAGKMSISPNTTYPSLLEDGRVEYRVALTEDRLPRLEEIRIWGPLQ |
| | | EDADIQVYRRYGEEYGNLTRPDITFTYFQPKPRQAWVWAAVRGPCSVSCG |
| | | AGLRWVNYSCLDQARKELVETVQCQGSQQPPAWPEACVLEPCPPYWAVGD |
| | | FGPCSASCGGGLRERPVRCVEAQGSLLKTLPPARCRAGAQQPAVALETCN |
| | | PQPCPARWEVSEPSSCTSAGGAGLALENETCVPGADGLEAPVTEGPGSVD |
| | | EKLPAPEPCVGMSCPPGWGHLDATSAGEKAPSPWGSIRTGAQAAHVWTPA |
| | | AGSCSVSCGRGLMELRFLCMDSALRVPVQEELCGLASKPGSRREVCQAVP |
| | | CPARWQYKLAACSVSCGRGVVRRILYCARAHGEDDGEEILLDTQCQGLPR |
| | | PEPQEACSLEPCPPRWKVMSLGPCSASCGLGTARRSVACVQLDQGQDVEV |
| | | DEAACAALVRPEASVPCLIADCTYRWHVGTWMECSVSCGDGIQRRRDTCL |
| | | GPQAQAPVPADFCQHLPKPVTVRGCWAGPCVGQGTPSLVPHEEAAVPGRT |
| | | TATPAGASLEWSQARGLLFSPAPQPRRLLPGPQENSVQSSACGRQHLEPT |
| | | GTIDMRGPGQADCAVAIGRPLGEVVTLRVLESSLNCSAGDMLLLWGRLTW |
| | | RKMCRKLLDMTFSSKTNTLVVRQRCGRPGGGVLLRYGSQLAPETFYRECD |
| | | MQLFGPWGEIVSPSLSPATSNAGGCRLFINVAPHARIAIHALATNMGAGT |
| | | EGANASYILIRDTHSLRTTAFHGQQVLYWESESSQAEMEFSEGFLKAQAS |
| | | LRGQYWTLQSWVPEMQDPQSWKGKEGTSRGPFEQKLISEEDLNMHTGHHH |
| | | HHH |
| 77 | Exemplified P1147V | MHQRHPRARCPPLCVAGILACGFLLGCWGPSHFQQSCLQALEPQAVSSYL |
| | variant | SPGAPLKGRPPSPGFQRQRQRQRRAAGGILHLELLVAVGPDVFQAHQEDT |
| | | ERYVLTNLNIGAELLRDPSLGAQFRVHLVKMVILTEPEGAPNITANLTSS |
| | | LLSVCGWSQTINPEDDTDPGHADLVLYITRFDLELPDGNRQVRGVTQLGG |
| | | ACSPTWSCLITEDTGFDLGVTIAHEIGHSFGLEHDGAPGSGCGPSGHVMA |
| | | SDGAAPRAGLAWSPCSRRQLLSLLSAGRARCVWDPPRPQPGSAGHPPDAQ |
| | | PGLYYSANEQCRVAFGPKAVACTFAREHLDMCQALSCHTDPLDQSSCSRL |
| | | LVPLLDGTECGVEKWCSKGRCRSLVELTPIAAVHGRWSSWGPRSPCSRSC |
| | | GGGVVTRRRQCNNPRPAFGGRACVGADLQAEMCNTQACEKTQLEFMSQQC |
| | | ARTDGQPLRSSPGGASFYHWGAAVPHSQGDALCRHMCRAIGESFIMKRGD |
| | | SFLDGTRCMPSGPREDGTLSLCVSGSCRTFGCDGRMDSQQVWDRCQVCGG |
| | | DNSTCSPRKGSFTAGRAREYVTFLTVTPNLTSVYIANHRPLFTHLAVRIG |
| | | GRYVVAGKMSISPNTTYPSLLEDGRVEYRVALTEDRLPRLEEIRIWGPLQ |
| | | EDADIQVYRRYGEEYGNLTRPDITFTYFQPKPRQAWVWAAVRGPCSVSCG |
| | | AGLRWVNYSCLDQARKELVETVQCQGSQQPPAWPEACVLEPCPPYWAVGD |
| | | FGPCSASCGGGLRERPVRCVEAQGSLLKTLPPARCRAGAQQPAVALETCN |
| | | PQPCPARWEVSEPSSCTSAGGAGLALENETCVPGADGLEAPVTEGPGSVD |
| | | EKLPAPEPCVGMSCPPGWGHLDATSAGEKAPSPWGSIRTGAQAAHVWTPA |
| | | AGSCSVSCGRGLMELRFLCMDSALRVPVQEELCGLASKPGSRREVCQAVP |
| | | CPARWQYKLAACSVSCGRGVVRRILYCARAHGEDDGEEILLDTQCQGLPR |
| | | PEPQEACSLEPCPPRWKVMSLGPCSASCGLGTARRSVACVQLDQGQDVEV |
| | | DEAACAALVRPEASVPCLIADCTYRWHVGTWMECSVSCGDGIQRRRDTCL |
| | | GPQAQAPVPADFCQHLPKPVTVRGCWAGPCVGQGTPSLVPHEEAAAVGRT |
| | | TATPAGASLEWSQARGLLFSPAPQPRRLLPGPQENSVQSSACGRQHLEPT |
| | | GTIDMRGPGQADCAVAIGRPLGEVVTLRVLESSLNCSAGDMLLLWGRLTW |
| | | RKMCRKLLDMTFSSKTNTLVVRQRCGRPGGGVLLRYGSQLAPETFYRECD |
| | | MQLFGPWGEIVSPSLSPATSNAGGCRLFINVAPHARIAIHALATNMGAGT |
| | | EGANASYILIRDTHSLRTTAFHGQQVLYWESESSQAEMEFSEGFLKAQAS |
| | | LRGQYWTLQSWVPEMQDPQSWKGKEGTSRGPFEQKLISEEDLNMHTGHHH |
| | | HHH |
| 78 | Exemplified P1154V | MHQRHPRARCPPLCVAGILACGFLLGCWGPSHFQQSCLQALEPQAVSSYL |
| | variant | SPGAPLKGRPPSPGFQRQRQRQRRAAGGILHLELLVAVGPDVFQAHQEDT |
| | | ERYVLTNLNIGAELLRDPSLGAQFRVHLVKMVILTEPEGAPNITANLTSS |
| | | LLSVCGWSQTINPEDDTDPGHADLVLYITRFDLELPDGNRQVRGVTQLGG |
| | | ACSPTWSCLITEDTGFDLGVTIAHEIGHSFGLEHDGAPGSGCGPSGHVMA |
| | | SDGAAPRAGLAWSPCSRRQLLSLLSAGRARCVWDPPRPQPGSAGHPPDAQ |
| | | PGLYYSANEQCRVAFGPKAVACTFAREHLDMCQALSCHTDPLDQSSCSRL |
| | | LVPLLDGTECGVEKWCSKGRCRSLVELTPIAAVHGRWSSWGPRSPCSRSC |
| | | GGGVVTRRRQCNNPRPAFGGRACVGADLQAEMCNTQACEKTQLEFMSQQC |
| | | ARTDGQPLRSSPGGASFYHWGAAVPHSQGDALCRHMCRAIGESFIMKRGD |
| | | SFLDGTRCMPSGPREDGTLSLCVSGSCRTFGCDGRMDSQQVWDRCQVCGG |
| | | DNSTCSPRKGSFTAGRAREYVTFLTVTPNLTSVYIANHRPLFTHLAVRIG |
| | | GRYVVAGKMSISPNTTYPSLLEDGRVEYRVALTEDRLPRLEEIRIWGPLQ |
| | | EDADIQVYRRYGEEYGNLTRPDITFTYFQPKPRQAWVWAAVRGPCSVSCG |
| | | AGLRWVNYSCLDQARKELVETVQCQGSQQPPAWPEACVLEPCPPYWAVGD |
| | | FGPCSASCGGGLRERPVRCVEAQGSLLKTLPPARCRAGAQQPAVALETCN |
| | | PQPCPARWEVSEPSSCTSAGGAGLALENETCVPGADGLEAPVTEGPGSVD |
| | | EKLPAPEPCVGMSCPPGWGHLDATSAGEKAPSPWGSIRTGAQAAHVWTPA |
| | | AGSCSVSCGRGLMELRFLCMDSALRVPVQEELCGLASKPGSRREVCQAVP |
| | | CPARWQYKLAACSVSCGRGVVRRILYCARAHGEDDGEEILLDTQCQGLPR |
| | | PEPQEACSLEPCPPRWKVMSLGPCSASCGLGTARRSVACVQLDQGQDVEV |
| | | DEAACAALVRPEASVPCLIADCTYRWHVGTWMECSVSCGDGIQRRRDTCL |
| | | GPQAQAPVPADFCQHLPKPVTVRGCWAGPCVGQGTPSLVPHEEAAAPGRT |
| | | TATVAGASLEWSQARGLLFSPAPQPRRLLPGPQENSVQSSACGRQHLEPT |
| | | GTIDMRGPGQADCAVAIGRPLGEVVTLRVLESSLNCSAGDMLLLWGRLTW |
| | | RKMCRKLLDMTFSSKTNTLVVRQRCGRPGGGVLLRYGSQLAPETFYRECD |
| | | MQLFGPWGEIVSPSLSPATSNAGGCRLFINVAPHARIAIHALATNMGAGT |
| | | EGANASYILIRDTHSLRTTAFHGQQVLYWESESSQAEMEFSEGFLKAQAS |
| | | LRGQYWTLQSWVPEMQDPQSWKGKEGTSRGPFEQKLISEEDLNMHTGHHH |
| | | HHH |
| 79 | Exemplified P1171V | MHQRHPRARCPPLCVAGILACGFLLGCWGPSHFQQSCLQALEPQAVSSYL |
| | variant | SPGAPLKGRPPSPGFQRQRQRQRRAAGGILHLELLVAVGPDVFQAHQEDT |
| | | ERYVLTNLNIGAELLRDPSLGAQFRVHLVKMVILTEPEGAPNITANLTSS |
| | | LLSVCGWSQTINPEDDTDPGHADLVLYITRFDLELPDGNRQVRGVTQLGG |
| | | ACSPTWSCLITEDTGFDLGVTIAHEIGHSFGLEHDGAPGSGCGPSGHVMA |
| | | SDGAAPRAGLAWSPCSRRQLLSLLSAGRARCVWDPPRPQPGSAGHPPDAQ |
| | | PGLYYSANEQCRVAFGPKAVACTFAREHLDMCQALSCHTDPLDQSSCSRL |
| | | LVPLLDGTECGVEKWCSKGRGRSLVELTPIAAVHGRWSSWGPRSPCSRSC |
| | | GGGVVTRRRQCNNPRPAFGGRACVGADLQAEMCNTQACEKTQLEFMSQQC |
| | | ARTDGQPLRSSPGGASFYHWGAAVPHSQGDALCRHMCRAIGESFIMKRGD |
| | | SFLDGTRCMPSGPREDGTLSLCVSGSCRTFGCDGRMDSQQVWDRCQVCGG |
| | | DNSTCSPRKGSFTAGRAREYVTFLTVTPNLTSVYIANHRPLFTHLAVRIG |
| | | GRYVVAGKMSISPNTTYPSLLEDGRVEYRVALTEDRLPRLEEIRIWGPLQ |
| | | EDADIQVYRRYGEEYGNLTRPDITFTYFQPKPRQAWVWAAVRGPCSVSCG |
| | | AGLRWVNYSCLDQARKELVETVQCQGSQQPPAWPEACVLEPCPPYWAVGD |
| | | FGPCSASCGGGLRERPVRCVEAQGSLLKTLPPARCRAGAQQPAVALETCN |
| | | PQPCPARWEVSEPSSCTSAGGAGLALENETCVPGADGLEAPVTEGPGSVD |
| | | EKLPAPEPCVGMSCPPGWGHLDATSAGEKAPSPWGSIRTGAQAAHVWTPA |
| | | AGSCSVSCGRGLMELRFLCMDSALRVPVQEELCGLASKPGSRREVCQAVP |
| | | CPARWQYKLAACSVSCGRGVVRRILYCARAHGEDDGEEILLDTQCQGLPR |
| | | PEPQEACSLEPCPPRWKVMSLGPCSASCGLGTARRSVACVQLDQGQDVEV |
| | | DEAACAALVRPEASVPCLIADCTYRWHVGTWMECSVSCGDGIQRRRDTCL |
| | | GPQAQAPVPADFCQHLPKPVTVRGCWAGPCVGQGTPSLVPHEEAAAPGRT |
| | | TATPAGASLEWSQARGLLFSVAPQPRRLLPGPQENSVQSSACGRQHLEPT |
| | | GTIDMRGPGQADCAVAIGRPLGEVVTLRVLESSLNCSAGDMLLLWGRLTW |
| | | RKMCRKLLDMTFSSKTNTLVVRQRCGRPGGGVLLRYGSQLAPETFYRECD |
| | | MQLFGPWGEIVSPSLSPATSNAGGCRLFINVAPHARIAIHALATNMGAGT |
| | | EGANASYILIRDTHSLRTTAFHGQQVLYWESESSQAEMEFSEGFLKAQAS |
| | | LRGQYWTLQSWVPEMQDPQSWKGKEGTSRGPFEQKLISEEDLNMHTGHHH |
| | | HHH |
| 80 | Exemplified P1173V | MHQRHPRARCPPLCVAGILACGFLLGCWGPSHFQQSCLQALEPQAVSSYL |
| | variant | SPGAPLKGRPPSPGFQRQRQRQRRAAGGILHLELLVAVGPDVFQAHQEDT |
| | | ERYVLTNLNIGAELLRDPSLGAQFRVHLVKMVILTEPEGAPNITANLTSS |
| | | LLSVCGWSQTINPEDDTDPGHADLVLYITRFDLELPDGNRQVRGVTQLGG |
| | | ACSPTWSCLITEDTGFDLGVTIAHEIGHSFGLEHDGAPGSGCGPSGHVMA |
| | | SDGAAPRAGLAWSPCSRRQLLSLLSAGRARCVWDPPRPQPGSAGHPPDAQ |
| | | PGLYYSANEQCRVAFGPKAVACTFAREHLDMCQALSCHTDPLDQSSCSRL |
| | | LVPLLDGTECGVEKWCSKGRCRSLVELTPIAAVHGRWSSWGPRSPCSRSC |
| | | GGGVVTRRRQCNNPRPAFGGRACVGADLQAEMCNTQACEKTQLEFMSQQC |
| | | ARTDGQPLRSSPGGASFYHWGAAVPHSQGDALCRHMCRAIGESFIMKRGD |
| | | SFLDGTRCMPSGPREDGTLSLCVSGSCRTFGCDGRMDSQQVWDRCQVCGG |
| | | DNSTCSPRKGSFTAGRAREYVTFLTVTPNLTSVYIANHRPLFTHLAVRIG |
| | | GRYVVAGKMSISPNTTYPSLLEDGRVEYRVALTEDRLPRLEEIRIWGPLQ |
| | | EDADIQVYRRYGEEYGNLTRPDITFTYFQPKPRQAWVWAAVRGPCSVSCG |
| | | AGLRWVNYSCLDQARKELVETVQCQGSQQPPAWPEACVLEPCPPYWAVGD |
| | | FGPCSASCGGGLRERPVRCVEAQGSLLKTLPPARCRAGAQQPAVALETCN |
| | | PQPCPARWEVSEPSSCTSAGGAGLALENETCVPGADGLEAPVTEGPGSVD |
| | | EKLPAPEPCVGMSCPPGWGHLDATSAGEKAPSPWGSIRTGAQAAHVWTPA |
| | | AGSCSVSCGRGLMELRFLCMDSALRVPVQEELCGLASKPGSRREVCQAVP |
| | | CPARWQYKLAACSVSCGRGVVRRILYCARAHGEDDGEEILLDTQCQGLPR |
| | | PEPQEACSLEPCPPRWKVMSLGPCSASCGLGTARRSVACVQLDQGQDVEV |
| | | DEAACAALVRPEASVPCLIADCTYRWHVGTWMECSVSCGDGIQRRRDTCL |
| | | GPQAQAPVPADFCQHLPKPVTVRGCWAGPCVGQGTPSLVPHEEAAAPGRT |
| | | TATPAGASLEWSQARGLLFSPAVQPRRLLPGPQENSVQSSACGRQHLEPT |
| | | GTIDMRGPGQADCAVAIGRPLGEVVTLRVLESSLNCSAGDMLLLWGRLTW |
| | | RKMCRKLLDMTFSSKTNTLVVRQRCGRPGGGVLLRYGSQLAPETFYRECD |
| | | MQLFGPWGEIVSPSLSPATSNAGGCRLFINVAPHARIAIHALATNMGAGT |
| | | EGANASYILIRDTHSLRTTAFHGQQVLYWESESSQAEMEFSEGFLKAQAS |
| | | LRGQYWTLQSWVPEMQDPQSWKGKEGTSRGPFEQKLISEEDLNMHTGHHH |
| | | HHH |
| 81 | Exemplified P1175V | MHQRHPRARCPPLCVAGILACGFLLGCWGPSHFQQSCLQALEPQAVSSYL |
| | variant | SPGAPLKGRPPSPGFQRQRQRQRRAAGGILHLELLVAVGPDVFQAHQEDT |
| | | ERYVLTNLNIGAELLRDPSLGAQFRVHLVKMVILTEPEGAPNITANLTSS |
| | | LLSVCGWSQTINPEDDTDPGHADLVLYITRFDLELPDGNRQVRGVTQLGG |
| | | ACSPTWSCLITEDTGFDLGVTIAHEIGHSFGLEHDGAPGSGCGPSGHVMA |
| | | SDGAAPRAGLAWSPCSRRQLLSLLSAGRARCVWDPPRPQPGSAGHPPDAQ |
| | | PGLYYSANEQCRVAFGPKAVACTFAREHLDMCQALSCHTDPLDQSSCSRL |
| | | LVPLLDGTECGVEKWCSKGRCRSLVELTPIAAVHGRWSSWGPRSPCSRSC |
| | | GGGVVTRRRQCNNPRPAFGGRACVGADLQAEMCNTQACEKTQLEFMSQQC |
| | | ARTDGQPLRSSPGGASFYHWGAAVPHSQGDALCRHMCRAIGESFIMKRGD |
| | | SFLDGTRCMPSGPREDGTLSLCVSGSCRTFGCDGRMDSQQVWDRCQVCGG |
| | | DNSTCSPRKGSFTAGRAREYVTFLTVTPNLTSVYIANHRPLFTHLAVRIG |
| | | GRYVVAGKMSISPNTTYPSLLEDGRVEYRVALTEDRLPRLEEIRIWGPLQ |
| | | EDADIQVYRRYGEEYGNLTRPDITFTYFQPKPRQAWVWAAVRGPCSVSCG |
| | | AGLRWVNYSCLDQARKELVETVQCQGSQQPPAWPEACVLEPCPPYWAVGD |
| | | FGPCSASCGGGLRERPVRCVEAQGSLLKTLPPARCRAGAQQPAVALETCN |
| | | PQPCPARWEVSEPSSCTSAGGAGLALENETCVPGADGLEAPVTEGPGSVD |
| | | EKLPAPEPCVGMSCPPGWGHLDATSAGEKAPSPWGSIRTGAQAAHVWTPA |
| | | AGSCSVSCGRGLMELRFLCMDSALRVPVQEELCGLASKPGSRREVCQAVP |
| | | CPARWQYKLAACSVSCGRGVVRRILYCARAHGEDDGEEILLDTQCQGLPR |
| | | PEPQEACSLEPCPPRWKVMSLGPCSASCGLGTARRSVACVQLDQGQDVEV |
| | | DEAACAALVRPEASVPCLIADCTYRWHVGTWMECSVSCGDGIQRRRDTCL |
| | | GPQAQAPVPADFCQHLPKPVTVRGCWAGPCVGQGTPSLVPHEEAAAPGRT |
| | | TATPAGASLEWSQARGLLFSPAPQVRRLLPGPQENSVQSSACGRQHLEPT |
| | | GTIDMRGPGQADCAVAIGRPLGEVVTLRVLESSLNCSAGDMLLLWGRLTW |
| | | RKMCRKLLDMTFSSKTNTLVVRQRCGRPGGGVLLRYGSQLAPETFYRECD |
| | | MQLFGPWGEIVSPSLSPATSNAGGCRLFINVAPHARIAIHALATNMGAGT |
| | | EGANASYILIRDTHSLRTTAFHGQQVLYWESESSQAEMEFSEGFLKAQAS |
| | | LRGQYWTLQSWVPEMQDPQSWKGKEGTSRGPFEQKLISEEDLNMHTGHHH |
| | | HHH |
| 82 | Exemplified P1180V | MHQRHPRARCPPLCVAGILACGFLLGCWGPSHFQQSCLQALEPQAVSSYL |
| | variant | SPGAPLKGRPPSPGFQRQRQRQRRAAGGILHLELLVAVGPDVFQAHQEDT |
| | | ERYVLTNLNIGAELLRDPSLGAQFRVHLVKMVILTEPEGAPNITANLTSS |
| | | LLSVCGWSQTINPEDDTDPGHADLVLYITRFDLELPDGNRQVRGVTQLGG |
| | | ACSPTWSCLITEDTGFDLGVTIAHEIGHSFGLEHDGAPGSGCGPSGHVMA |
| | | SDGAAPRAGLAWSPCSRRQLLSLLSAGRARCVWDPPRPQPGSAGHPPDAQ |
| | | PGLYYSANEQCRVAFGPKAVACTFAREHLDMCQALSCHTDPLDQSSCSRL |
| | | LVPLLDGTECGVEKWCSKGRCRSLVELTPIAAVHGRWSSWGPRSPCSRSC |
| | | GGGVVTRRRQCNNPRPAFGGRACVGADLQAEMCNTQACEKTQLEFMSQQC |
| | | ARTDGQPLRSSPGGASFYHWGAAVPHSQGDALCRHMCRAIGESFIMKRGD |
| | | SFLDGTRCMPSGPREDGTLSLCVSGSCRTFGCDGRMDSQQVWDRCQVCGG |
| | | DNSTCSPRKGSFTAGRAREYVTFLTVTPNLTSVYIANHRPLFTHLAVRIG |
| | | GRYVVAGKMSISPNTTYPSLLEDGRVEYRVALTEDRLPRLEEIRIWGPLQ |
| | | EDADIQVYRRYGEEYGNLTRPDITFTYFQPKPRQAWVWAAVRGPCSVSCG |
| | | AGLRWVNYSCLDQARKELVETVQCQGSQQPPAWPEACVLEPCPPYWAVGD |
| | | FGPCSASCGGGLRERPVRCVEAQGSLLKTLPPARCRAGAQQPAVALETCN |
| | | PQPCPARWEVSEPSSCTSAGGAGLALENETCVPGADGLEAPVTEGPGSVD |
| | | EKLPAPEPCVGMSCPPGWGHLDATSAGEKAPSPWGSIRTGAQAAHVWTPA |
| | | AGSCSVSCGRGLMELRFLCMDSALRVPVQEELCGLASKPGSRREVCQAVP |
| | | CPARWQYKLAACSVSCGRGVVRRILYCARAHGEDDGEEILLDTQCQGLPR |
| | | PEPQEACSLEPCPPRWKVMSLGPCSASCGLGTARRSVACVQLDQGQDVEV |
| | | DEAACAALVRPEASVPCLIADCTYRWHVGTWMECSVSCGDGIQRRRDTCL |
| | | GPQAQAPVPADFCQHLPKPVTVRGCWAGPCVGQGTPSLVPHEEAAAPGRT |
| | | TATPAGASLEWSQARGLLFSPAPQPRRLLVGPQENSVQSSACGRQHLEPT |
| | | GTIDMRGPGQADCAVAIGRPLGEVVTLRVLESSLNCSAGDMLLLWGRLTW |
| | | RKMCRKLLDMTFSSKTNTLVVRQRCGRPGGGVLLRYGSQLAPETFYRECD |
| | | MQLFGPWGEIVSPSLSPATSNAGGCRLFINVAPHARIAIHALATNMGAGT |
| | | EGANASYILIRDTHSLRTTAFHGQQVLYWESESSQAEMEFSEGFLKAQAS |
| | | LRGQYWTLQSWVPEMQDPQSWKGKEGTSRGPFEQKLISEEDLNMHTGHHH |
| | | HHH |
| 83 | Exemplified P1182V | MHQRHPRARCPPLCVAGILACGFLLGCWGPSHFQQSCLQALEPQAVSSYL |
| | variant | SPGAPLKGRPPSPGFQRQRQRQRRAAGGILHLELLVAVGPDVFQAHQEDT |
| | | ERYVLTNLNIGAELLRDPSLGAQFRVHLVKMVILTEPEGAPNITANLTSS |
| | | LLSVCGWSQTINPEDDTDPGHADLVLYITRFDLELPDGNRQVRGVTQLGG |
| | | ACSPTWSCLITEDTGFDLGVTIAHEIGHSFGLEHDGAPGSGCGPSGHVMA |
| | | SDGAAPRAGLAWSPCSRRQLLSLLSAGRARCVWDPPRPQPGSAGHPPDAQ |
| | | PGLYYSANEQCRVAFGPKAVACTFAREHLDMCQALSCHTDPLDQSSCSRL |
| | | LVPLLDGTECGVEKWCSKGRCRSLVELTPIAAVHGRWSSWGPRSPCSRSC |
| | | GGGVVTRRRQCNNPRPAFGGRACVGADLQAEMCNTQACEKTQLEFMSQQC |
| | | ARTDGQPLRSSPGGASFYHWGAAVPHSQGDALCRHMCRAIGESFIMKRGD |
| | | SFLDGTRCMPSGPREDGTLSLCVSGSCRTFGCDGRMDSQQVWDRCQVCGG |
| | | DNSTCSPRKGSFTAGRAREYVTFLTVTPNLTSVYIANHRPLFTHLAVRIG |
| | | GRYVVAGKMSISPNTTYPSLLEDGRVEYRVALTEDRLPRLEEIRIWGPLQ |
| | | EDADIQVYRRYGEEYGNLTRPDITFTYFQPKPRQAWVWAAVRGPCSVSCG |
| | | AGLRWVNYSCLDQARKELVETVQCQGSQQPPAWPEACVLEPCPPYWAVGD |
| | | FGPCSASCGGGLRERPVRCVEAQGSLLKTLPPARCRAGAQQPAVALETCN |
| | | PQPCPARWEVSEPSSCTSAGGAGLALENETCVPGADGLEAPVTEGPGSVD |
| | | EKLPAPEPCVGMSCPPGWGHLDATSAGEKAPSPWGSIRTGAQAAHVWTPA |
| | | AGSCSVSCGRGLMELRFLCMDSALRVPVQEELCGLASKPGSRREVCQAVP |
| | | CPARWQYKLAACSVSCGRGVVRRILYCARAHGEDDGEEILLDTQCQGLPR |
| | | PEPQEACSLEPCPPRWKVMSLGPCSASCGLGTARRSVACVQLDQGQDVEV |
| | | DEAACAALVRPEASVPCLIADCTYRWHVGTWMECSVSCGDGIQRRRDTCL |
| | | GPQAQAPVPADFCQHLPKPVTVRGCWAGPCVGQGTPSLVPHEEAAAPGRT |
| | | TATPAGASLEWSQARGLLFSPAPQPRRLLPGVQENSVQSSACGRQHLEPT |
| | | GTIDMRGPGQADCAVAIGRPLGEVVTLRVLESSLNCSAGDMLLLWGRLTW |
| | | RKMCRKLLDMTFSSKTNTLVVRQRCGRPGGGVLLRYGSQLAPETFYRECD |
| | | MQLFGPWGEIVSPSLSPATSNAGGCRLFINVAPHARIAIHALATNMGAGT |
| | | EGANASYILIRDTHSLRTTAFHGQQVLYWESESSQAEMEFSEGFLKAQAS |
| | | LRGQYWTLQSWVPEMQDPQSWKGKEGTSRGPFEQKLISEEDLNMHTGHHH |
| | | HHH |
| 84 | Exemplified wildtype | ATGCACCAGCGTCACCCCCGGGCAAGATGCCCTCCCCTCTGTGTGGCCGG |
| | ADAMTS13 | AATCCTTGCCTGTGGCTTTCTCCTGGGCTGCTGGGGACCCTCCCATTTCC |
| | nucleotide sequence | AGCAGAGCTGTCTTCAGGCTTTGGAGCCACAGGCCGTGTCTTCTTACTTG |
| | | AGCCCTGGTGCTCCCTTAAAAGGCCGCCCTCCTTCCCCTGGCTTCCAGAG |
| | | GCAGAGGCAGAGGCAGAGGGGGGCTGCAGGCGGCATCCTACACCTGGAGC |
| | | TGCTGGTGGCCGTGGGCCCCGATGTCTTCCAGGCTCACCAGGAGGACACA |
| | | GAGCGCTATGTGCTCACCAACCTCAACATCGGGGCAGAACTGCTTCGGGA |
| | | CCCGTCCCTGGGGGCTCAGTTTCGGGTGCACCTGGTGAAGATGGTCATTC |
| | | TGACAGAGCCTGAGGGTGCTCCAAATATCACAGCCAACCTCACCTCGTCC |
| | | CTGCTGAGCGTCTGTGGGTGGAGCCAGACCATCAACCCTGAGGACGACAC |
| | | GGATCCTGGCCATGCTGACCTGGTCCTCTATATCACTAGGTTTGACCTGG |
| | | AGTTGCCTGATGGTAACCGGCAGGTGCGGGGCGTCACCCAGCTGGGGGGT |
| | | GCCTGCTCCCCAACCTGGAGCTGCCTCATTACCGAGGACACTGGCTTCGA |
| | | CCTGGGAGTCACCATTGCCCATGAGATTGGGCACAGCTTCGGCCTGGAGC |
| | | ACGACGGCGCGCCCGGCAGCGGCTGCGGCCCCAGCGGACACGTGATGGCT |
| | | TCGGACGGCGCCGCGCCCCGCGCCGGCCTCGCCTGGTCCCCCTGCAGCCG |
| | | CCGGCAGCTGCTGAGCCTGCTCAGCGCAGGACGGGCGCGCTGCGTGTGGG |
| | | ACCCGCCGCGGCCTCAACCCGGGTCCGCGGGGCACCCGCCGGATGCGCAG |
| | | CCTGGCCTCTACTACAGCGCCAACGAGCAGTGCCGCGTGGCCTTCGGCCC |
| | | CAAGGCTGTCGCCTGCACCTTCGCCAGGGAGCACCTGGATATGTGCCAGG |
| | | CCCTCTCCTGCCACACAGACCCGCTGGACCAAAGCAGCTGCAGCCGCCTC |
| | | CTCGTTCCTCTCCTGGATGGGACAGAATGTGGCGTGGAGAAGTGGTGCTC |
| | | CAAAGGTCGCTGCCGCTCCCTGGTGGAGCTGACCCCCATAGCAGCAGTGC |
| | | ATGGGCGCTGGTCTAGCTGGGGTCCCCGAAGTCCTTGCTCCCGCTCCTGC |
| | | GGAGGAGGTGTGGTCACCAGGAGGCGGCAGTGCAACAACCCCAGACCTGC |
| | | CTTTGGGGGGCGTGCATGTGTTGGTGCTGACCTCCAGGCCGAGATGTGCA |
| | | ACACTCAGGCCTGCGAGAAGACCCAGCTGGAGTTCATGTCGCAACAGTGG |
| | | GCCAGGACCGACGGCCAGCCGCTGCGCTCCTCCCCTGGGGGCGCCTCCTT |
| | | CTACCACTGGGGTGCTGCTGTACCACACAGCCAAGGGGATGCTCTGTGCA |
| | | GACACATGTGCCGGGCCATTGGCGAGAGCTTCATCATGAAGCGTGGAGAC |
| | | AGCTTCCTCGATGGGACCCGGTGTATGCCAAGTGGCCCCCGGGAGGACGG |
| | | GACCCTGAGCCTGTGTGTGTCGGGCAGCTGCAGGACATTTGGCTGTGATG |
| | | GTAGGATGGACTCCCAGCAGGTATGGGACAGGTGCCAGGTGTGTGGTGGG |
| | | GACAACAGCACGTGCAGCCCACGGAAGGGCTCTTTCACAGCTGGCAGAGC |
| | | GAGAGAATATGTCACGTTTCTGACAGTTACCCCCAACCTGACCAGTGTCT |
| | | ACATTGCCAACCACAGGCCTCTCTTCACACACTTGGCGGTGAGGATCGGA |
| | | GGGCGCTATGTCGTGGCTGGGAAGATGAGCATCTCCCCTAACACCACCTA |
| | | CCCCTCCCTCCTGGAGGATGGTCGTGTCGAGTACAGAGTGGCCCTCACCG |
| | | AGGACCGGCTGCCCCGCCTGGAGGAGATCCGCATCTGGGGACCCCTCCAG |
| | | GAAGATGCTGACATCCAGGTTTACAGGCGGTATGGCGAGGAGTATGGCAA |
| | | CCTCACCCGCCCAGACATCACCTTCACCTACTTCCAGCCTAAGCCACGGC |
| | | AGGCCTGGGTGTGGGCCGCTGTGCGTGGGCCCTGCTCGGTGAGCTGTGGG |
| | | GCAGGGCTGCGCTGGGTAAACTACAGCTGCCTGGACCAGGCCAGGAAGGA |
| | | GTTGGTGGAGACTGTCCAGTGCCAAGGGAGCCAGCAGCCACCAGCGTGGC |
| | | CAGAGGCCTGCGTGCTCGAACCCTGCCCTCCCTACTGGGCGGTGGGAGAC |
| | | TTCGGCCCATGCAGCGCCTCCTGTGGGGGTGGCCTGGGGGAGCGGCCAGT |
| | | GCGCTGCGTGGAGGCCCAGGGCAGCCTCCTGAAGACATTGCCCCCAGCCC |
| | | GGTGCAGAGCAGGGGCCCAGCAGCCAGCTGTGGCGCTGGAAACCTGCAAC |
| | | CCCCAGCCCTGCCCTGCCAGGTGGGAGGTGTCAGAGCCCAGCTCATGCAC |
| | | ATCAGCTGGTGGAGCAGGCCTGGCCTTGGAGAACGAGACCTGTGTGCCAG |
| | | GGGCAGATGGCCTGGAGGCTCCAGTGACTGAGGGGCCTGGCTCCGTAGAT |
| | | GAGAAGCTGCCTGCCCCTGAGCCCTGTGTCGGGATGTCATGTCCTCCAGG |
| | | CTGGGGCCATCTGGATGCCACCTCTGCAGGGGAGAAGGCTCCCTCCCCAT |
| | | GGGGCAGCATCAGGACGGGGGCTCAAGCTGCACACGTGTGGACCCCTGCG |
| | | GCAGGGTCGTGCTCCGTCTCCTGCGGGCGAGGTCTGATGGAGCTCCGTTT |
| | | CCTGTGCATGGACTCTGCCCTCAGGGTGCCTGTCCAGGAAGAGCTGTGTG |
| | | GCCTGGCAAGCAAGCCTGGGAGCCGGGGGGAGGTCTGCCAGGCTGTCCCG |
| | | TGCCCTGCTCGGTGGCAGTACAAGCTGGCGGCCTGCAGCGTGAGCTGTGG |
| | | GAGAGGGGTCGTGCGGAGGATCCTGTATTGTGCCCGGGCCCATGGGGAGG |
| | | ACGATGGTGAGGAGATCCTGTTGGACACCCAGTGCCAGGGGCTGCCTCGC |
| | | CCGGAACCCCAGGAGGCCTGCAGCCTGGAGCCCTGCCCACCTAGGTGGAA |
| | | AGTCATGTCCCTTGGCCCATGTTCGGCCAGCTGTGGCCTTGGCACTGCTA |
| | | GACGCTCGGTGGCCTGTGTGCAGCTCGACCAAGGCCAGGACGTGGAGGTG |
| | | GACGAGGCGGCCTGTGCGGCGCTGGTGCGGCCCGAGGCCAGTGTCCCCTG |
| | | TCTCATTGCCGACTGCACCTACCGCTGGCATGTTGGCACCTGGATGGAGT |
| | | GCTCTGTTTCCTGTGGGGATGGCATCCAGCGCCGGCGTGACACCTGCCTC |
| | | GGACCCCAGGCCCAGGCGCCTGTGCCAGCTGATTTCTGCCAGCACTTGCC |
| | | CAAGCCGGTGACTGTGCGTGGCTGCTGGGCTGGGCCCTGTGTGGGACAGG |
| | | GTACGCCCAGCCTGGTGCCCCACGAAGAAGCCGCTGCTCCAGGACGGACC |
| | | ACAGCCACCCCTGCTGGTGCCTCCCTGGAGTGGTCCCAGGCCCGGGGCCT |
| | | GCTCTTCTCCCCGGCTCCCCAGCCTCGGCGGCTCCTGCCCGGGCCCCAGG |
| | | AAAACTCAGTGCAGTCCAGTGCCTGTGGCAGGCAGCACCTTGAGCCAACA |
| | | GGAACCATTGACATGCGAGGCCCAGGGGAGGCAGACTGTGCAGTGGCCAT |
| | | TGGGGGGCCCCTCGGGGAGGTGGTGACCCTCCGCGTCCTTGAGAGTTCTC |
| | | TCAACTGCAGTGCGGGGGACATGTTGCTGCTTTGGGGCCGGCTCACCTGG |
| | | AGGAAGATGTGCAGGAAGCTGTTGGACATGACTTTCAGCTCCAAGACCAA |
| | | CACGCTGGTGGTGAGGCAGCGCTGCGGGGGGCCAGGAGGTGGGGTGCTGC |
| | | TGCGGTATGGGAGCCAGCTTGCTCCTGAAACCTTCTACAGAGAATGTGAC |
| | | ATGCAGCTCTTTGGGCCCTGGGGTGAAATCGTGAGCCCCTCGCTGAGTCC |
| | | AGCCACGAGTAATGCAGGGGGCTGCCGGCTCTTCATTAATGTGGCTCCGC |
| | | ACGCACGGATTGCCATCCATGCCCTGGCCACCAACATGGGCGCTGGGACC |
| | | GAGGGAGCCAATGCCAGCTACATCTTGATCCGGGACACCCACAGCTTGAG |
| | | GACCACAGCGTTCCATGGGCAGCAGGTGCTCTACTGGGAGTCAGAGAGCA |
| | | GCCAGGCTGAGATGGAGTTCAGCGAGGGCTTCCTGAAGGCTCAGGCCAGC |
| | | CTGCGGGGCCAGTACTGGACCCTCCAATCATGGGTACCGGAGATGCAGGA |
| | | CCCTCAGTCCTGGAAGGGAAAGGAAGGAACCTCTAGAGGGCCCTTCGAAC |
| | | AAAAACTCATCTCAGAAGAGGATCTGAATATGCATACCGGTCATCATCAC |
| | | CATCACCAT |
| 85 | Exemplified | ATGCACCAGCGTCACCCCCGGGCAAGATGCCCTCCCCTCTGTGTGGCCGG |
| | ADAMTS13 | AATCCTTGCCTGTGGCTTTCTCCTGGGCTGCTGGGGACCCTCCCATTTCC |
| | R568K/F592Y/R660 | AGCAGAGCTGTCTTCAGGCTTTGGAGCCACAGGCCGTGTCTTCTTACTTG |
| | K/Y661F/Y665F | AGCCCTGGTGCTCCCTTAAAAGGCCGCCCTCCTTCCCCTGGCTTCCAGAG |
| | variant nucleotide | GCAGAGGCAGAGGCAGAGGGGGGCTGCAGGCGGCATCCTACACCTGGAGC |
| | sequence | TGCTGGTGGCCGTGGGCCCCGATGTCTTCCAGGCTCACCAGGAGGACACA |
| | | GAGCGCTATGTGCTCACCAACCTCAACATCGGGGCAGAACTGCTTCGGGA |
| | | CCCGTCCCTGGGGGCTCAGTTTCGGGTGCACCTGGTGAAGATGGTCATTC |
| | | TGACAGAGCCTGAGGGTGCTCCAAATATCACAGCCAACCTCACCTCGTCC |
| | | CTGCTGAGCGTCTGTGGGTGGAGCCAGACCATCAACCCTGAGGACGACAC |
| | | GGATCCTGGCCATGCTGACCTGGTCCTCTATATCACTAGGTTTGACCTGG |
| | | AGTTGCCTGATGGTAACCGGCAGGTGCGGGGCGTCACCCAGCTGGGGGGT |
| | | GCCTGCTCCCCAACCTGGAGCTGCCTCATTACCGAGGACACTGGCTTCGA |
| | | CCTGGGAGTCACCATTGCCCATGAGATTGGGCACAGCTTCGGCCTGGAGC |
| | | ACGACGGCGCGCCCGGCAGCGGCTGCGGCCCCAGCGGACACGTGATGGCT |
| | | TCGGACGGCGCCGCGCCCCGCGCCGGCCTCGCCTGGTCCCCCTGCAGCCG |
| | | CCGGCAGCTGCTGAGCCTGCTCAGCGCAGGACGGGCGCGCTGCGTGTGGG |
| | | ACCCGCCGCGGCCTCAACCCGGGTCCGCGGGGCACCCGCCGGATGCGCAG |
| | | CCTGGCCTCTACTACAGCGCCAACGAGCAGTGCCGCGTGGCCTTCGGCCC |
| | | CAAGGCTGTCGCCTGCACCTTCGCCAGGGAGCACCTGGATATGTGCCAGG |
| | | CCCTCTCCTGCCACACAGACCCGCTGGACCAAAGCAGCTGCAGCCGCCTC |
| | | CTCGTTCCTCTCCTGGATGGGACAGAATGTGGCGTGGAGAAGTGGTGCTC |
| | | CAAAGGTCGCTGCCGCTCCCTGGTGGAGCTGACCCCCATAGCAGCAGTGC |
| | | ATGGGCGCTGGTCTAGCTGGGGTCCCCGAAGTCCTTGCTCCCGCTCCTGC |
| | | GGAGGAGGTGTGGTCACCAGGAGGCGGCAGTGCAACAACCCCAGACCTGC |
| | | CTTTGGGGGGCGTGCATGTGTTGGTGCTGACCTCCAGGCCGAGATGTGCA |
| | | ACACTCAGGCCTGCGAGAAGACCCAGCTGGAGTTCATGTCGCAACAGTGC |
| | | GCCAGGACCGACGGCCAGCCGCTGCGCTCCTCCCCTGGGGGCGCCTCCTT |
| | | CTACCACTGGGGTGCTGCTGTACCACACAGCCAAGGGGATGCTCTGTGCA |
| | | GACACATGTGCCGGGCCATTGGCGAGAGCTTCATCATGAAGCGTGGAGAC |
| | | AGCTTCCTCGATGGGACCCGGTGTATGCCAAGTGGCCCCCGGGAGGACGG |
| | | GACCCTGAGCCTGTGTGTGTCGGGCAGCTGCAGGACATTTGGCTGTGATG |
| | | GTAGGATGGACTCCCAGCAGGTATGGGACAGGTGCCAGGTGTGTGGTGGG |
| | | GACAACAGCACGTGCAGCCCACGGAAGGGCTCTTTCACAGCTGGCAGAGC |
| | | GAAGGAATATGTCACGTTTCTGACAGTTACCCCCAACCTGACCAGTGTCT |
| | | ACATTGCCAACCACAGGCCTCTCTACACACACTTGGCGGTGAGGATCGGA |
| | | GGGCGCTATGTCGTGGCTGGGAAGATGAGCATCTCCCCTAACACCACCTA |
| | | CCCCTCCCTCCTGGAGGATGGTCGTGTCGAGTACAGAGTGGCCCTCACCG |
| | | AGGACCGGCTGCCCCGCCTGGAGGAGATCCGCATCTGGGGACCCCTCCAG |
| | | GAAGATGCTGACATCCAGGTTTACAGGAAGTTTGGCGAGGAGTTTGGCAA |
| | | CCTCACCCGCCCAGACATCACCTTCACCTACTTCCAGCCTAAGCCACGGC |
| | | AGGCCTGGGTGTGGGCCGCTGTGCGTGGGCCCTGCTCGGTGAGCTGTGGG |
| | | GCAGGGCTGCGCTGGGTAAACTACAGCTGCCTGGACCAGGCCAGGAAGGA |
| | | GTTGGTGGAGACTGTCCAGTGCCAAGGGAGCCAGCAGCCACCAGCGTGGC |
| | | CAGAGGCCTGCGTGCTCGAACCCTGCCCTCCCTACTGGGCGGTGGGAGAC |
| | | TTCGGCCCATGCAGCGCCTCCTGTGGGGGTGGCCTGGGGGAGCGGCCAGT |
| | | GCGCTGCGTGGAGGCCCAGGGCAGCCTCCTGAAGACATTGCCCCCAGCCC |
| | | GGTGCAGAGCAGGGGCCCAGCAGCCAGCTGTGGCGCTGGAAACCTGCAAC |
| | | CCCCAGCCCTGCCCTGCCAGGTGGGAGGTGTCAGAGCCCAGCTCATGCAC |
| | | ATCAGCTGGTGGAGCAGGCCTGGCCTTGGAGAACGAGACCTGTGTGCCAG |
| | | GGGCAGATGGCCTGGAGGCTCCAGTGACTGAGGGGCCTGGCTCCGTAGAT |
| | | GAGAAGCTGCCTGCCCCTGAGCCCTGTGTCGGGATGTCATGTCCTCCAGG |
| | | CTGGGGCCATCTGGATGCCACCTCTGCAGGGGAGAAGGCTCCCTCCCCAT |
| | | GGGGCAGCATCAGGACGGGGGCTCAAGCTGCACACGTGTGGACCCCTGCG |
| | | GCAGGGTCGTGCTCCGTCTCCTGCGGGCGAGGTCTGATGGAGCTCCGTTT |
| | | CCTGTGCATGGACTCTGCCCTCAGGGTGCCTGTCCAGGAAGAGCTGTGTG |
| | | GCCTGGCAAGCAAGCCTGGGAGCCGGCGGGAGGTCTGCCAGGCTGTCCCG |
| | | TGCCCTGCTCGGTGGCAGTACAAGCTGGCGGCCTGCAGCGTGAGCTGTGG |
| | | GAGAGGGGTCGTGCGGAGGATCCTGTATTGTGCCCGGGCCCATGGGGAGG |
| | | ACGATGGTGAGGAGATCCTGTTGGACACCCAGTGCCAGGGGCTGCCTCGC |
| | | CCGGAACCCCAGGAGGCCTGCAGCCTGGAGCCCTGCCCACCTAGGTGGAA |
| | | AGTCATGTCCCTTGGCCCATGTTCGGCCAGCTGTGGCCTTGGCACTGCTA |
| | | GACGCTCGGTGGCCTGTGTGCAGCTCGACCAAGGCCAGGACGTGGAGGTG |
| | | GACGAGGCGGCCTGTGCGGGGCTGGTGCGGCCCGAGGCCAGTGTCCCCTG |
| | | TCTCATTGCCGACTGCACCTACCGCTGGCATGTTGGCACCTGGATGGAGT |
| | | GCTCTGTTTCCTGTGGGGATGGCATCCAGCGCCGGCGTGACACCTGCCTC |
| | | GGACCCCAGGCCCAGGCGCCTGTGCCAGCTGATTTCTGCCAGCACTTGCC |
| | | CAAGCCGGTGACTGTGCGTGGCTGCTGGGCTGGGCCCTGTGTGGGACAGG |
| | | GTACGCCCAGCCTGGTGCCCCACGAAGAAGCCGCTGCTCCAGGACGGACC |
| | | ACAGCCACCCCTGCTGGTGCCTCCCTGGAGTGGTCCCAGGCCCGGGGCCT |
| | | GCTCTTCTCCCCGGCTCCCCAGCCTCGGCGGCTCCTGCCCGGGCCCCAGG |
| | | AAAACTCAGTGCAGTCCAGTGCCTGTGGCAGGCAGCACCTTGAGCCAACA |
| | | GGAACCATTGACATGCGAGGCCCAGGGGAGGCAGACTGTGCAGTGGCCAT |
| | | TGGGGGGCCCCTCGGGGAGGTGGTGACCCTCCGCGTCCTTGAGAGTTCTC |
| | | TCAACTGCAGTGCGGGGGACATGTTGCTGCTTTGGGGCCGGCTCACCTGG |
| | | AGGAAGATGTGCAGGAAGCTGTTGGACATGACTTTCAGCTCCAAGACCAA |
| | | CACGCTGGTGGTGAGGCAGCGCTGCGGGGGGCCAGGAGGTGGGGTGCTGC |
| | | TGCGGTATGGGAGCCAGCTTGCTCCTGAAACCTTCTACAGAGAATGTGAC |
| | | ATGCAGCTCTTTGGGCCCTGGGGTGAAATCGTGAGCCCCTCGCTGAGTCC |
| | | AGCCACGAGTAATGCAGGGGGCTGCCGGCTCTTCATTAATGTGGCTCCGC |
| | | ACGCACGGATTGCCATCCATGCCCTGGCCACCAACATGGGCGCTGGGACC |
| | | GAGGGAGCCAATGCCAGCTACATCTTGATCCGGGACACCCACAGCTTGAG |
| | | GACCACAGCGTTCCATGGGCAGCAGGTGCTCTACTGGGAGTCAGAGAGCA |
| | | GCCAGGCTGAGATGGAGTTCAGCGAGGGCTTCCTGAAGGCTCAGGCCAGC |
| | | CTGGGGGGCCAGTACTGGACCCTCCAATCATGGGTACCGGAGATGCAGGA |
| | | CCCTCAGTCCTGGAAGGGAAAGGAAGGAACCTCTAGAGGGCCCTTCGAAC |
| | | AAAAACTCATCTCAGAAGAGGATCTGAATATGCATACCGGTCATCATCAC |
| | | CATCACCAT |
| 86 | Exemplified A1144V | ATGCACCAGCGTCACCCCCGGGCAAGATGCCCTCCCCTCTGTGTGGCCGG |
| | variant nucleotide | AATCCTTGCCTGTGGCTTTCTCCTGGGCTGCTGGGGACCCTCCCATTTCC |
| | sequence | AGCAGAGCTGTCTTCAGGCTTTGGAGCCACAGGCCGTGTCTTCTTACTTG |
| | | AGCCCTGGTGCTCCCTTAAAAGGCCGCCCTCCTTCCCCTGGCTTCCAGAG |
| | | GCAGAGGCAGAGGCAGAGGGGGGCTGCAGGCGGCATCCTACACCTGGAGC |
| | | TGCTGGTGGCCGTGGGCCCCGATGTCTTCCAGGCTCACCAGGAGGACACA |
| | | GAGCGCTATGTGCTCACCAACCTCAACATCGGGGCAGAACTGCTTCGGGA |
| | | CCCGTCCCTGGGGGCTCAGTTTCGGGTGCACCTGGTGAAGATGGTCATTC |
| | | TGACAGAGCCTGAGGGTGCTCCAAATATCACAGCCAACCTCACCTCGTCC |
| | | CTGCTGAGCGTCTGTGGGTGGAGCCAGACCATCAACCCTGAGGACGACAC |
| | | GGATCCTGGCCATGCTGACCTGGTCCTCTATATCACTAGGTTTGACCTGG |
| | | AGTTGCCTGATGGTAACCGGCAGGTGCGGGGCGTCACCCAGCTGGGCGGT |
| | | GCCTGCTCCCCAACCTGGAGCTGCCTCATTACCGAGGACACTGGCTTCGA |
| | | CCTGGGAGTCACCATTGCCCATGAGATTGGGCACAGCTTCGGCCTGGAGC |
| | | ACGACGGCGCGCCCGGCAGCGGCTGCGGCCCCAGCGGACACGTGATGGCT |
| | | TCGGACGGCGCCGCGCCCCGCGCCGGCCTCGCCTGGTCCCCCTGCAGCCG |
| | | CCGGCAGCTGCTGAGCCTGCTCAGCGCAGGACGGGCGCGCTGCGTGTGGG |
| | | ACCCGCCGCGGCCTCAACCCGGGTCCGCGGGGCACCCGCCGGATGCGCAG |
| | | CCTGGCCTCTACTACAGCGCCAACGAGCAGTGCCGCGTGGCCTTCGGCCC |
| | | CAAGGCTGTCGCCTGCACCTTCGCCAGGGAGCACCTGGATATGTGCCAGG |
| | | CCCTCTCCTGCCACACAGACCCGCTGGACCAAAGCAGCTGCAGCCGCCTC |
| | | CTCGTTCCTCTCCTGGATGGGACAGAATGTGGCGTGGAGAAGTGGTGCTC |
| | | CAAAGGTCGCTGCCGCTCCCTGGTGGAGCTGACCCCCATAGCAGCAGTGC |
| | | ATGGGCGCTGGTCTAGCTGGGGTCCCCGAAGTCCTTGCTCCCGCTCCTGC |
| | | GGAGGAGGTGTGGTCACCAGGAGGCGGCAGTGCAACAACCCCAGACCTGC |
| | | CTTTGGGGGGCGTGCATGTGTTGGTGCTGACCTCCAGGCCGAGATGTGCA |
| | | ACACTCAGGCCTGCGAGAAGACCCAGCTGGAGTTCATGTCGCAACAGTGC |
| | | GCCAGGACCGACGGCCAGCCGCTGCGCTCCTCCCCTGGCGGCGCCTCCTT |
| | | CTACCACTGGGGTGCTGCTGTACCACACAGCCAAGGGGATGCTCTGTGCA |
| | | GACACATGTGCCGGGCCATTGGCGAGAGCTTCATCATGAAGCGTGGAGAC |
| | | AGCTTCCTCGATGGGACCCGGTGTATGCCAAGTGGCCCCCGGGAGGACGG |
| | | GACCCTGAGCCTGTGTGTGTCGGGCAGCTGCAGGACATTTGGCTGTGATG |
| | | GTAGGATGGACTCCCAGCAGGTATGGGACAGGTGCCAGGTGTGTGGTGGG |
| | | GACAACAGCACGTGCAGCCCACGGAAGGGCTCTTTCACAGCTGGCAGAGC |
| | | GAGAGAATATGTCACGTTTCTGACAGTTACCCCCAACCTGACCAGTGTCT |
| | | ACATTGCCAACCACAGGCCTCTCTTCACACACTTGGCGGTGAGGATCGGA |
| | | GGGCGCTATGTCGTGGCTGGGAAGATGAGCATCTCCCCTAACACCACCTA |
| | | CCCCTCCCTCCTGGAGGATGGTCGTGTCGAGTACAGAGTGGCCCTCACCG |
| | | AGGACCGGCTGCCCCGCCTGGAGGAGATCCGCATCTGGGGACCCCTCCAG |
| | | GAAGATGCTGACATCCAGGTTTACAGGCGGTATGGCGAGGAGTATGGCAA |
| | | CCTCACCCGCCCAGACATCACCTTCACCTACTTCCAGCCTAAGCCACGGC |
| | | AGGCCTGGGTGTGGGCCGCTGTGCGTGGGCCCTGCTCGGTGAGCTGTGGG |
| | | GCAGGGCTGCGCTGGGTAAACTACAGCTGCCTGGACCAGGCCAGGAAGGA |
| | | GTTGGTGGAGACTGTCCAGTGCCAAGGGAGCCAGCAGCCACCAGCGTGGC |
| | | CAGAGGCCTGCGTGCTCGAACCCTGCCCTCCCTACTGGGGGGTGGGAGAC |
| | | TTCGGCCCATGCAGCGCCTCCTGTGGGGGTGGCCTGGGGGAGCGGCCAGT |
| | | GCGCTGCGTGGAGGCCCAGGGCAGCCTCCTGAAGACATTGCCCCCAGCCC |
| | | GGTGCAGAGCAGGGGCCCAGCAGCCAGCTGTGGCGCTGGAAACCTGCAAC |
| | | CCCCAGCCCTGCCCTGCCAGGTGGGAGGTGTCAGAGCCCAGCTCATGCAC |
| | | ATCAGCTGGTGGAGCAGGCCTGGCCTTGGAGAACGAGACCTGTGTGCCAG |
| | | GGGCAGATGGCCTGGAGGCTCCAGTGACTGAGGGGCCTGGCTCCGTAGAT |
| | | GAGAAGCTGCCTGCCCCTGAGCCCTGTGTCGGGATGTCATGTCCTCCAGG |
| | | CTGGGGCCATCTGGATGCCACCTCTGCAGGGGAGAAGGCTCCCTCCCCAT |
| | | GGGGCAGCATCAGGACGGGGGCTCAAGCTGCACACGTGTGGACCCCTGCG |
| | | GCAGGGTCGTGCTCCGTCTCCTGCGGGCGAGGTCTGATGGAGCTCCGTTT |
| | | CCTGTGCATGGACTCTGCCCTCAGGGTGCCTGTCCAGGAAGAGCTGTGTG |
| | | GCCTGGCAAGCAAGCCTGGGAGCCGGCGGGAGGTCTGCCAGGCTGTCCCG |
| | | TGCCCTGCTCGGTGGCAGTACAAGCTGGCGGCCTGCAGCGTGAGCTGTGG |
| | | GAGAGGGGTCGTGCGGAGGATCCTGTATTGTGCCCGGGCCCATGGGGAGG |
| | | ACGATGGTGAGGAGATCCTGTTGGACACCCAGTGCCAGGGGCTGCCTCGC |
| | | CCGGAACCCCAGGAGGCCTGCAGCCTGGAGCCCTGCCCACCTAGGTGGAA |
| | | AGTCATGTCCCTTGGCCCATGTTCGGCCAGCTGTGGCCTTGGCACTGCTA |
| | | GACGCTCGGTGGCCTGTGTGCAGCTCGACCAAGGCCAGGACGTGGAGGTG |
| | | GACGAGGCGGCCTGTGCGGCGCTGGTGCGGCCCGAGGCCAGTGTCCCCTG |
| | | TCTCATTGCCGACTGCACCTACCGCTGGCATGTTGGCACCTGGATGGAGT |
| | | GCTCTGTTTCCTGTGGGGATGGCATCCAGCGCCGGCGTGACACCTGCCTC |
| | | GGACCCCAGGCCCAGGCGCCTGTGCCAGCTGATTTCTGCCAGCACTTGCC |
| | | CAAGCCGGTGACTGTGCGTGGCTGCTGGGCTGGGCCCTGTGTGGGACAGG |
| | | GTACGCCCAGCCTGGTGCCCCACGAAGAAGTGGCTGCTCCAGGACGGACC |
| | | ACAGCCACCCCTGCTGGTGCCTCCCTGGAGTGGTCCCAGGCCCGGGGCCT |
| | | GCTCTTCTCCCCGGCTCCCCAGCCTCGGCGGCTCCTGCCCGGGCCCCAGG |
| | | AAAACTCAGTGCAGTCCAGTGCCTGTGGCAGGCAGCACCTTGAGCCAACA |
| | | GGAACCATTGACATGCGAGGCCCAGGGGAGGCAGACTGTGCAGTGGCCAT |
| | | TGGGGGGCCCCTCGGGGAGGTGGTGACCCTCCGCGTCCTTGAGAGTTCTC |
| | | TCAACTGCAGTGCGGGGGACATGTTGCTGCTTTGGGGCCGGCTCACCTGG |
| | | AGGAAGATGTGCAGGAAGCTGTTGGACATGACTTTCAGCTCCAAGACCAA |
| | | CACGCTGGTGGTGAGGCAGCGCTGCGGGGGGCCAGGAGGTGGGGTGCTGC |
| | | TGCGGTATGGGAGCCAGCTTGCTCCTGAAACCTTCTACAGAGAATGTGAC |
| | | ATGCAGCTCTTTGGGCCCTGGGGTGAAATCGTGAGCCCCTCGCTGAGTCC |
| | | AGCCACGAGTAATGCAGGGGGCTGCCGGCTCTTCATTAATGTGGCTCCGC |
| | | ACGCACGGATTGCCATCCATGCCCTGGCCACCAACATGGGCGCTGGGACC |
| | | GAGGGAGCCAATGCCAGCTACATCTTGATCCGGGACACCCACAGCTTGAG |
| | | GACCACAGCGTTCCATGGGCAGCAGGTGCTCTACTGGGAGTCAGAGAGCA |
| | | GCCAGGCTGAGATGGAGTTCAGCGAGGGCTTCCTGAAGGCTCAGGCCAGC |
| | | CTGCGGGGCCAGTACTGGACCCTCCAATCATGGGTACCGGAGATGCAGGA |
| | | CCCTCAGTCCTGGAAGGGAAAGGAAGGAACCTCTAGAGGGCCCTTCGAAC |
| | | AAAAACTCATCTCAGAAGAGGATCTGAATATGCATACCGGTCATCATCAC |
| | | CATCACCAT |
| 87 | Exemplified A1145V | ATGCACCAGCGTCACCCCCGGGCAAGATGCCCTCCCCTCTGTGTGGCCGG |
| | variant nucleotide | AATCCTTGCCTGTGGCTTTCTCCTGGGCTGCTGGGGACCCTCCCATTTCC |
| | sequence | AGCAGAGGTGTCTTCAGGCTTTGGAGCCACAGGCCGTGTCTTCTTACTTG |
| | | AGCCCTGGTGCTCCCTTAAAAGGCCGCCCTCCTTCCCCTGGCTTCCAGAG |
| | | GCAGAGGCAGAGGCAGAGGGGGGCTGCAGGCGGCATCCTACACCTGGAGC |
| | | TGCTGGTGGCCGTGGGCCCCGATGTCTTCCAGGCTCACCAGGAGGACACA |
| | | GAGCGCTATGTGCTCACCAACCTCAACATCGGGGCAGAACTGCTTCGGGA |
| | | CCCGTCCCTGGGGGCTCAGTTTCGGGTGCACCTGGTGAAGATGGTCATTC |
| | | TGACAGAGCCTGAGGGTGCTCCAAATATCACAGCCAACCTCACCTCGTCC |
| | | CTGCTGAGCGTCTGTGGGTGGAGCCAGACCATCAACCCTGAGGACGACAC |
| | | GGATCCTGGCCATGCTGACCTGGTCCTCTATATCACTAGGTTTGACCTGG |
| | | AGTTGCCTGATGGTAACCGGCAGGTGCGGGGCGTCACCCAGCTGGGCGGT |
| | | GCCTGCTCCCCAACCTGGAGCTGCCTCATTACCGAGGACACTGGCTTCGA |
| | | CCTGGGAGTCACCATTGCCCATGAGATTGGGCACAGCTTCGGCCTGGAGC |
| | | ACGACGGCGCGCCCGGCAGCGGCTGCGGCCCCAGCGGACACGTGATGGCT |
| | | TCGGACGGCGCCGCGCCCCGCGCCGGCCTCGCCTGGTCCCCCTGCAGCCG |
| | | CCGGCAGCTGCTGAGCCTGCTCAGCGCAGGACGGGCGCGCTGCGTGTGGG |
| | | ACCCGCCGCGGCCTCAACCCGGGTCCGCGGGGCACCCGCCGGATGCGCAG |
| | | CCTGGCCTCTACTACAGCGCCAACGAGCAGTGCCGCGTGGCCTTCGGCCC |
| | | CAAGGCTGTCGCCTGCACCTTCGCCAGGGAGCACCTGGATATGTGCCAGG |
| | | CCCTCTCCTGCCACACAGACCCGCTGGACCAAAGCAGCTGCAGCCGCCTC |
| | | CTCGTTCCTCTCCTGGATGGGACAGAATGTGGCGTGGAGAAGTGGTGCTC |
| | | CAAAGGTCGCTGCCGCTCCCTGGTGGAGCTGACCCCCATAGCAGCAGTGC |
| | | ATGGGCGCTGGTCTAGCTGGGGTCCCCGAAGTCCTTGCTCCCGCTCCTGC |
| | | GGAGGAGGTGTGGTCACCAGGAGGCGGCAGTGCAACAACCCCAGACCTGC |
| | | CTTTGGGGGGCGTGCATGTGTTGGTGCTGACCTCCAGGCCGAGATGTGCA |
| | | ACACTCAGGCCTGCGAGAAGACCCAGCTGGAGTTCATGTCGCAACAGTGC |
| | | GCCAGGACCGACGGCCAGCCGCTGCGCTCCTCCCCTGGCGGCGCCTCCTT |
| | | CTACCACTGGGGTGCTGCTGTACCACACAGCCAAGGGGATGCTCTGTGCA |
| | | GACACATGTGCCGGGCCATTGGCGAGAGCTTCATCATGAAGCGTGGAGAC |
| | | AGCTTCCTCGATGGGACCCGGTGTATGCCAAGTGGCCCCCGGGAGGACGG |
| | | GACCCTGAGCCTGTGTGTGTCGGGCAGCTGCAGGACATTTGGCTGTGATG |
| | | GTAGGATGGACTCCCAGCAGGTATGGGACAGGTGCCAGGTGTGTGGTGGG |
| | | GACAACAGCACGTGCAGCCCACGGAAGGGCTCTTTCACAGCTGGCAGAGC |
| | | GAGAGAATATGTCACGTTTCTGACAGTTACCCCCAACCTGACCAGTGTCT |
| | | ACATTGCCAACCACAGGCCTCTCTTCACACACTTGGCGGTGAGGATCGGA |
| | | GGGCGCTATGTCGTGGCTGGGAAGATGAGCATCTCCCCTAACACCACCTA |
| | | CCCCTCCCTCCTGGAGGATGGTCGTGTCGAGTACAGAGTGGCCCTCACCG |
| | | AGGACCGGCTGCCCCGCCTGGAGGAGATCCGCATCTGGGGACCCCTCCAG |
| | | GAAGATGCTGACATCCAGGTTTACAGGCGGTATGGCGAGGAGTATGGCAA |
| | | CCTCACCCGCCCAGACATCACCTTCACCTACTTCCAGCCTAAGCCACGGC |
| | | AGGCCTGGGTGTGGGCCGCTGTGCGTGGGCCCTGCTCGGTGAGCTGTGGG |
| | | GCAGGGCTGCGCTGGGTAAACTACAGCTGCCTGGACCAGGCCAGGAAGGA |
| | | GTTGGTGGAGACTGTCCAGTGCCAAGGGAGCCAGCAGCCACCAGCGTGGC |
| | | CAGAGGCCTGCGTGCTCGAACCCTGCCCTCCCTACTGGGCGGTGGGAGAC |
| | | TTCGGCCCATGCAGCGCCTCCTGTGGGGGTGGCCTGCGGGAGCGGCCAGT |
| | | GCGCTGCGTGGAGGCCCAGGGCAGCCTCCTGAAGACATTGCCCCCAGCCC |
| | | GGTGCAGAGCAGGGGCCCAGCAGCCAGCTGTGGCGCTGGAAACCTGCAAC |
| | | CCCCAGCCCTGCCCTGCCAGGTGGGAGGTGTCAGAGCCCAGCTCATGCAC |
| | | ATCAGCTGGTGGAGCAGGCCTGGCCTTGGAGAACGAGACCTGTGTGCCAG |
| | | GGGCAGATGGCCTGGAGGCTCCAGTGACTGAGGGGCCTGGCTCCGTAGAT |
| | | GAGAAGCTGCCTGCCCCTGAGCCCTGTGTCGGGATGTCATGTCCTCCAGG |
| | | CTGGGGCCATCTGGATGCCACCTCTGCAGGGGAGAAGGCTCCCTCCCCAT |
| | | GGGGCAGCATCAGGACGGGGGCTCAAGCTGCACACGTGTGGACCCCTGCG |
| | | GCAGGGTCGTGCTCCGTCTCCTGCGGGCGAGGTCTGATGGAGCTCCGTTT |
| | | CCTGTGCATGGACTCTGCCCTCAGGGTGCCTGTCCAGGAAGAGCTGTGTG |
| | | GCCTGGCAAGCAAGCCTGGGAGCCGGCGGGAGGTCTGCCAGGCTGTCCCG |
| | | TGCCCTGCTCGGTGGCAGTACAAGCTGGCGGCCTGCAGCGTGAGCTGTGG |
| | | GAGAGGGGTCGTGCGGAGGATCCTGTATTGTGCCCGGGCCCATGGGGAGG |
| | | ACGATGGTGAGGAGATCCTGTTGGACACCCAGTGCCAGGGGCTGCCTCGC |
| | | CCGGAACCCCAGGAGGCCTGCAGCCTGGAGCCCTGCCCACCTAGGTGGAA |
| | | AGTCATGTCCCTTGGCCCATGTTCGGCCAGCTGTGGCCTTGGCACTGCTA |
| | | GACGCTCGGTGGCCTGTGTGCAGCTCGACCAAGGCCAGGACGTGGAGGTG |
| | | GACGAGGCGGCCTGTGCGGCGCTGGTGCGGCCCGAGGCCAGTGTCCCCTG |
| | | TCTCATTGCCGACTGCACCTACCGCTGGCATGTTGGCACCTGGATGGAGT |
| | | GCTCTGTTTCCTGTGGGGATGGCATCCAGCGCCGGCGTGACACCTGCCTC |
| | | GGACCCCAGGCCCAGGCGCCTGTGCCAGCTGATTTCTGCCAGCACTTGCC |
| | | CAAGCCGGTGACTGTGCGTGGCTGCTGGGCTGGGCCCTGTGTGGGACAGG |
| | | GTACGCCCAGCCTGGTGCCCCACGAAGAAGCCGTGGCTCCAGGACGGACC |
| | | ACAGCCACCCCTGCTGGTGCCTCCCTGGAGTGGTCCCAGGCCCGGGGCCT |
| | | GCTCTTCTCCCCGGCTCCCCAGCCTCGGCGGCTCCTGCCCGGGCCCCAGG |
| | | AAAACTCAGTGCAGTCCAGTGCCTGTGGCAGGCAGCACCTTGAGCCAACA |
| | | GGAACCATTGACATGCGAGGCCCAGGGCAGGCAGACTGTGCAGTGGCCAT |
| | | TGGGCGGCCCCTCGGGGAGGTGGTGACCCTCCGCGTCCTTGAGAGTTCTC |
| | | TCAACTGCAGTGCGGGGGACATGTTGCTGCTTTGGGGCCGGCTCACCTGG |
| | | AGGAAGATGTGCAGGAAGCTGTTGGACATGACTTTCAGCTCCAAGACCAA |
| | | CACGCTGGTGGTGAGGCAGCGCTGCGGGCGGCCAGGAGGTGGGGTGCTGC |
| | | TGCGGTATGGGAGCCAGCTTGCTCCTGAAACCTTCTACAGAGAATGTGAC |
| | | ATGCAGCTCTTTGGGCCCTGGGGTGAAATCGTGAGCCCCTCGCTGAGTCC |
| | | AGCCACGAGTAATGCAGGGGGCTGCCGGCTCTTCATTAATGTGGCTCCGC |
| | | ACGCACGGATTGCCATCCATGCCCTGGCCACCAACATGGGCGCTGGGACC |
| | | GAGGGAGCCAATGCCAGCTACATCTTGATCCGGGACACCCACAGCTTGAG |
| | | GACCACAGCGTTCCATGGGCAGCAGGTGCTCTACTGGGAGTCAGAGAGCA |
| | | GCCAGGCTGAGATGGAGTTCAGCGAGGGCTTCCTGAAGGCTCAGGCCAGC |
| | | CTGCGGGGCCAGTACTGGACCCTCCAATCATGGGTACCGGAGATGCAGGA |
| | | CCCTCAGTCCTGGAAGGGAAAGGAAGGAACCTCTAGAGGGCCCTTCGAAC |
| | | AAAAACTCATCTCAGAAGAGGATCTGAATATGCATACCGGTCATCATCAC |
| | | CATCACCAT |
| 88 | Exemplified A1146V | ATGCACCAGCGTCACCCCCGGGCAAGATGCCCTCCCCTCTGTGTGGCCGG |
| | variant nucleotide | AATCCTTGCCTGTGGCTTTCTCCTGGGCTGCTGGGGACCCTCCCATTTCC |
| | sequence | AGCAGAGCTGTCTTCAGGCTTTGGAGCCACAGGCCGTGTCTTCTTACTTG |
| | | AGCCCTGGTGCTCCCTTAAAAGGCCGCCCTCCTTCCCCTGGCTTCCAGAG |
| | | GCAGAGGCAGAGGCAGAGGGGGGCTGCAGGCGGCATCCTACACCTGGAGC |
| | | TGCTGGTGGCCGTGGGCCCCGATGTCTTCCAGGCTCACCAGGAGGACACA |
| | | GAGCGCTATGTGCTCACCAACCTCAACATCGGGGCAGAACTGCTTCGGGA |
| | | CCCGTCCCTGGGGGCTCAGTTTCGGGTGCACCTGGTGAAGATGGTCATTC |
| | | TGACAGAGCCTGAGGGTGCTCCAAATATCACAGCCAACCTCACCTCGTCC |
| | | CTGCTGAGCGTCTGTGGGTGGAGCCAGACCATCAACCCTGAGGACGACAC |
| | | GGATCCTGGCCATGCTGACCTGGTCCTCTATATCACTAGGTTTGACCTGG |
| | | AGTTGCCTGATGGTAACCGGCAGGTGCGGGGCGTCACCCAGCTGGGCGGT |
| | | GCCTGCTCCCCAACCTGGAGCTGCCTCATTACCGAGGACACTGGCTTCGA |
| | | CCTGGGAGTCACCATTGCCCATGAGATTGGGCACAGCTTCGGCCTGGAGC |
| | | ACGACGGCGCGCCCGGCAGCGGCTGCGGCCCCAGCGGACACGTGATGGCT |
| | | TCGGACGGCGCCGCGCCCCGCGCCGGCCTCGCCTGGTCCCCCTGCAGCCG |
| | | CCGGCAGCTGCTGAGCCTGCTCAGCGCAGGACGGGCGCGCTGCGTGTGGG |
| | | ACCCGCCGCGGCCTCAACCCGGGTCCGCGGGGCACCCGCCGGATGCGCAG |
| | | CCTGGCCTCTACTACAGCGCCAACGAGCAGTGCCGCGTGGCCTTCGGCCC |
| | | CAAGGCTGTCGCCTGCACCTTCGCCAGGGAGCACCTGGATATGTGCCAGG |
| | | CCCTCTCCTGCCACACAGACCCGCTGGACCAAAGCAGCTGCAGCCGCCTC |
| | | CTCGTTCCTCTCCTGGATGGGACAGAATGTGGCGTGGAGAAGTGGTGCTC |
| | | CAAAGGTCGCTGCCGCTCCCTGGTGGAGCTGACCCCCATAGCAGCAGTGC |
| | | ATGGGCGCTGGTCTAGCTGGGGTCCCCGAAGTCCTTGCTCCCGCTCCTGC |
| | | GGAGGAGGTGTGGTCACCAGGAGGCGGCAGTGCAACAACCCCAGACCTGC |
| | | CTTTGGGGGGCGTGCATGTGTTGGTGCTGACCTCCAGGCCGAGATGTGCA |
| | | ACACTCAGGCCTGCGAGAAGACCCAGCTGGAGTTCATGTCGCAACAGTGC |
| | | GCCAGGACCGACGGCCAGCCGCTGCGCTCCTCCCCTGGCGGCGCCTCCTT |
| | | CTACCACTGGGGTGCTGCTGTACCACACAGCCAAGGGGATGCTCTGTGCA |
| | | GACACATGTGCCGGGCCATTGGCGAGAGCTTCATCATGAAGCGTGGAGAC |
| | | AGCTTCCTCGATGGGACCCGGTGTATGCCAAGTGGCCCCCGGGAGGACGG |
| | | GACCCTGAGCCTGTGTGTGTCGGGCAGCTGCAGGACATTTGGCTGTGATG |
| | | GTAGGATGGACTCCCAGCAGGTATGGGACAGGTGCCAGGTGTGTGGTGGG |
| | | GACAACAGCACGTGCAGCCCACGGAAGGGCTCTTTCACAGCTGGCAGAGC |
| | | GAGAGAATATGTCACGTTTCTGACAGTTACCCCCAACCTGACCAGTGTCT |
| | | ACATTGCCAACCACAGGCCTCTCTTCACACACTTGGCGGTGAGGATCGGA |
| | | GGGCGCTATGTCGTGGCTGGGAAGATGAGCATCTCCCCTAACACCACCTA |
| | | CCCCTCCCTCCTGGAGGATGGTCGTGTCGAGTACAGAGTGGCCCTCACCG |
| | | AGGACCGGCTGCCCCGCCTGGAGGAGATCCGCATCTGGGGACCCCTCCAG |
| | | GAAGATGCTGACATCCAGGTTTACAGGCGGTATGGCGAGGAGTATGGCAA |
| | | CCTCACCCGCCCAGACATCACCTTCACCTACTTCCAGCCTAAGCCACGGC |
| | | AGGCCTGGGTGTGGGCCGCTGTGCGTGGGCCCTGCTCGGTGAGCTGTGGG |
| | | GCAGGGCTGCGCTGGGTAAACTACAGCTGCCTGGACCAGGCCAGGAAGGA |
| | | GTTGGTGGAGACTGTCCAGTGCCAAGGGAGCCAGCAGCCACCAGCGTGGC |
| | | CAGAGGCCTGCGTGCTCGAACCCTGCCCTCCCTACTGGGCGGTGGGAGAC |
| | | TTCGGCCCATGCAGCGCCTCCTGTGGGGGTGGCCTGCGGGAGCGGCCAGT |
| | | GCGCTGCGTGGAGGCCCAGGGCAGCCTCCTGAAGACATTGCCCCCAGCCC |
| | | GGTGCAGAGCAGGGGCCCAGCAGCCAGCTGTGGCGCTGGAAACCTGCAAC |
| | | CCCCAGCCCTGCCCTGCCAGGTGGGAGGTGTCAGAGCCCAGCTCATGCAC |
| | | ATCAGCTGGTGGAGCAGGCCTGGCCTTGGAGAACGAGACCTGTGTGCCAG |
| | | GGGCAGATGGCCTGGAGGCTCCAGTGACTGAGGGGCCTGGCTCCGTAGAT |
| | | GAGAAGCTGCCTGCCCCTGAGCCCTGTGTCGGGATGTCATGTCCTCCAGG |
| | | CTGGGGCCATCTGGATGCCACCTCTGCAGGGGAGAAGGCTCCCTCCCCAT |
| | | GGGGCAGCATCAGGACGGGGGCTCAAGCTGCACACGTGTGGACCCCTGCG |
| | | GCAGGGTCGTGCTCCGTCTCCTGCGGGCGAGGTCTGATGGAGCTCCGTTT |
| | | CCTGTGCATGGACTCTGCCCTCAGGGTGCCTGTCCAGGAAGAGCTGTGTG |
| | | GCCTGGCAAGCAAGCCTGGGAGCCGGGGGGAGGTCTGCCAGGCTGTCCCG |
| | | TGCCCTGCTCGGTGGCAGTACAAGCTGGCGGCCTGCAGCGTGAGCTGTGG |
| | | GAGAGGGGTCGTGCGGAGGATCCTGTATTGTGCCCGGGCCCATGGGGAGG |
| | | ACGATGGTGAGGAGATCCTGTTGGACACCCAGTGCCAGGGGCTGCCTCGC |
| | | CCGGAACCCCAGGAGGCCTGCAGCCTGGAGCCCTGCCCACCTAGGTGGAA |
| | | AGTCATGTCCCTTGGCCCATGTTCGGCCAGCTGTGGCCTTGGCACTGCTA |
| | | GACGCTCGGTGGCCTGTGTGCAGCTCGACCAAGGCCAGGACGTGGAGGTG |
| | | GACGAGGCGGCCTGTGCGGCGCTGGTGCGGCCCGAGGCCAGTGTCCCCTG |
| | | TCTCATTGCCGACTGCACCTACCGCTGGCATGTTGGCACCTGGATGGAGT |
| | | GCTCTGTTTCCTGTGGGGATGGCATCCAGCGCCGGCGTGACACCTGCCTC |
| | | GGACCCCAGGCCCAGGCGCCTGTGCCAGCTGATTTCTGCCAGCACTTGCC |
| | | CAAGCCGGTGACTGTGCGTGGCTGCTGGGCTGGGCCCTGTGTGGGACAGG |
| | | GTACGCCCAGCCTGGTGCCCCACGAAGAAGCCGCTGTGCCAGGACGGACC |
| | | ACAGCCACCCCTGCTGGTGCCTCCCTGGAGTGGTCCCAGGCCCGGGGCCT |
| | | GCTCTTCTCCCCGGCTCCCCAGCCTCGGCGGCTCCTGCCCGGGCCCCAGG |
| | | AAAACTCAGTGCAGTCCAGTGCCTGTGGCAGGCAGCACCTTGAGCCAACA |
| | | GGAACCATTGACATGCGAGGCCCAGGGCAGGCAGACTGTGCAGTGGCCAT |
| | | TGGGCGGCCCCTCGGGGAGGTGGTGACCCTCCGCGTCCTTGAGAGTTCTC |
| | | TCAACTGCAGTGCGGGGGACATGTTGCTGCTTTGGGGCCGGCTCACCTGG |
| | | AGGAAGATGTGCAGGAAGCTGTTGGACATGACTTTCAGCTCCAAGACCAA |
| | | CACGCTGGTGGTGAGGCAGCGCTGCGGGGGGCCAGGAGGTGGGGTGCTGC |
| | | TGCGGTATGGGAGCCAGCTTGCTCCTGAAACCTTCTACAGAGAATGTGAC |
| | | ATGCAGCTCTTTGGGCCCTGGGGTGAAATCGTGAGCCCCTCGCTGAGTCC |
| | | AGCCACGAGTAATGCAGGGGGCTGCCGGCTCTTCATTAATGTGGCTCCGC |
| | | ACGCACGGATTGCCATCCATGCCCTGGCCACCAACATGGGCGCTGGGACC |
| | | GAGGGAGCCAATGCCAGCTACATCTTGATCCGGGACACCCACAGCTTGAG |
| | | GACCACAGCGTTCCATGGGCAGCAGGTGCTCTACTGGGAGTCAGAGAGCA |
| | | GCCAGGCTGAGATGGAGTTCAGCGAGGGCTTCCTGAAGGCTCAGGCCAGC |
| | | CTGCGGGGCCAGTACTGGACCCTCCAATCATGGGTACCGGAGATGCAGGA |
| | | CCCTCAGTCCTGGAAGGGAAAGGAAGGAACCTCTAGAGGGCCCTTCGAAC |
| | | AAAAACTCATCTCAGAAGAGGATCTGAATATGCATACCGGTCATCATCAC |
| | | CATCACCAT |
| 89 | Exemplified P1147V | ATGCACCAGCGTCACCCCCGGGCAAGATGCCCTCCCCTCTGTGTGGCCGG |
| | variant nucleotide | AATCCTTGCCTGTGGCTTTCTCCTGGGCTGCTGGGGACCCTCCCATTTCC |
| | sequence | AGCAGAGCTGTCTTCAGGCTTTGGAGCCACAGGCCGTGTCTTCTTACTTG |
| | | AGCCCTGGTGCTCCCTTAAAAGGCCGCCCTCCTTCCCCTGGCTTCCAGAG |
| | | GCAGAGGCAGAGGCAGAGGCGGGCTGCAGGCGGCATCCTACACCTGGAGC |
| | | TGCTGGTGGCCGTGGGCCCCGATGTCTTCCAGGCTCACCAGGAGGACACA |
| | | GAGCGCTATGTGCTCACCAACCTCAACATCGGGGCAGAACTGCTTCGGGA |
| | | CCCGTCCCTGGGGGCTCAGTTTCGGGTGCACCTGGTGAAGATGGTCATTC |
| | | TGACAGAGCCTGAGGGTGCTCCAAATATCACAGCCAACCTCACCTCGTCC |
| | | CTGCTGAGCGTCTGTGGGTGGAGCCAGACCATCAACCCTGAGGACGACAC |
| | | GGATCCTGGCCATGCTGACCTGGTCCTCTATATCACTAGGTTTGACCTGG |
| | | AGTTGCCTGATGGTAACCGGCAGGTGCGGGGCGTCACCCAGCTGGGCGGT |
| | | GCCTGCTCCCCAACCTGGAGCTGCCTCATTACCGAGGACACTGGCTTCGA |
| | | CCTGGGAGTCACCATTGCCCATGAGATTGGGCACAGCTTCGGCCTGGAGC |
| | | ACGACGGCGCGCCCGGCAGCGGCTGCGGCCCCAGCGGACACGTGATGGCT |
| | | TCGGACGGCGCCGCGCCCCGCGCCGGCCTCGCCTGGTCCCCCTGCAGCCG |
| | | CCGGCAGCTGCTGAGCCTGCTCAGCGCAGGACGGGCGCGCTGCGTGTGGG |
| | | ACCCGCCGCGGCCTCAACCCGGGTCCGCGGGGCACCCGCCGGATGCGCAG |
| | | CCTGGCCTCTACTACAGCGCCAACGAGCAGTGCCGCGTGGCCTTCGGCCC |
| | | CAAGGCTGTCGCCTGCACCTTCGCCAGGGAGCACCTGGATATGTGCCAGG |
| | | CCCTCTCCTGCCACACAGACCCGCTGGACCAAAGCAGCTGCAGCCGCCTC |
| | | CTCGTTCCTCTCCTGGATGGGACAGAATGTGGCGTGGAGAAGTGGTGCTC |
| | | CAAAGGTCGCTGCCGCTCCCTGGTGGAGCTGACCCCCATAGCAGCAGTGC |
| | | ATGGGCGCTGGTCTAGCTGGGGTCCCCGAAGTCCTTGCTCCCGCTCCTGC |
| | | GGAGGAGGTGTGGTCACCAGGAGGCGGCAGTGCAACAACCCCAGACCTGC |
| | | CTTTGGGGGGCGTGCATGTGTTGGTGCTGACCTCCAGGCCGAGATGTGCA |
| | | ACACTCAGGCCTGCGAGAAGACCCAGCTGGAGTTCATGTCGCAACAGTGC |
| | | GCCAGGACCGACGGCCAGCCGCTGCGCTCCTCCCCTGGCGGCGCCTCCTT |
| | | CTACCACTGGGGTGCTGCTGTACCACACAGCCAAGGGGATGCTCTGTGCA |
| | | GACACATGTGCCGGGCCATTGGCGAGAGCTTCATCATGAAGCGTGGAGAC |
| | | AGCTTCCTCGATGGGACCCGGTGTATGCCAAGTGGCCCCCGGGAGGACGG |
| | | GACCCTGAGCCTGTGTGTGTCGGGCAGCTGCAGGACATTTGGCTGTGATG |
| | | GTAGGATGGACTCCCAGCAGGTATGGGACAGGTGCCAGGTGTGTGGTGGG |
| | | GACAACAGCACGTGCAGCCCACGGAAGGGCTCTTTCACAGCTGGCAGAGC |
| | | GAGAGAATATGTCACGTTTCTGACAGTTACCCCCAACCTGACCAGTGTCT |
| | | ACATTGCCAACCACAGGCCTCTCTTCACACACTTGGCGGTGAGGATCGGA |
| | | GGGCGCTATGTCGTGGCTGGGAAGATGAGCATCTCCCCTAACACCACCTA |
| | | CCCCTCCCTCCTGGAGGATGGTCGTGTCGAGTACAGAGTGGCCCTCACCG |
| | | AGGACCGGCTGCCCCGCCTGGAGGAGATCCGCATCTGGGGACCCCTCCAG |
| | | GAAGATGCTGACATCCAGGTTTACAGGCGGTATGGCGAGGAGTATGGCAA |
| | | CCTCACCCGCCCAGACATCACCTTCACCTACTTCCAGCCTAAGCCAGGGC |
| | | AGGCCTGGGTGTGGGCCGCTGTGCGTGGGCCCTGCTCGGTGAGCTGTGGG |
| | | GCAGGGCTGCGCTGGGTAAACTACAGCTGCCTGGACCAGGCCAGGAAGGA |
| | | GTTGGTGGAGACTGTCCAGTGCCAAGGGAGCCAGCAGCCACCAGCGTGGC |
| | | CAGAGGCCTGCGTGCTCGAACCCTGCCCTCCCTACTGGGCGGTGGGAGAC |
| | | TTCGGCCCATGCAGCGCCTCCTGTGGGGGTGGCCTGCGGGAGCGGCCAGT |
| | | GCGCTGCGTGGAGGCCCAGGGCAGCCTCCTGAAGACATTGCCCCCAGCCC |
| | | GGTGCAGAGCAGGGGCCCAGCAGCCAGCTGTGGCGCTGGAAACCTGCAAC |
| | | CCCCAGCCCTGCCCTGCCAGGTGGGAGGTGTCAGAGCCCAGCTCATGCAC |
| | | ATCAGCTGGTGGAGCAGGCCTGGCCTTGGAGAACGAGACCTGTGTGCCAG |
| | | GGGCAGATGGCCTGGAGGCTCCAGTGACTGAGGGGCCTGGCTCCGTAGAT |
| | | GAGAAGCTGCCTGCCCCTGAGCCCTGTGTCGGGATGTCATGTCCTCCAGG |
| | | CTGGGGCCATCTGGATGCCACCTCTGCAGGGGAGAAGGCTCCCTCCCCAT |
| | | GGGGCAGCATCAGGACGGGGGCTCAAGCTGCACACGTGTGGACCCCTGCG |
| | | GCAGGGTCGTGCTCCGTCTCCTGCGGGCGAGGTCTGATGGAGCTCCGTTT |
| | | CCTGTGCATGGACTCTGCCCTCAGGGTGCCTGTCCAGGAAGAGCTGTGTG |
| | | GCCTGGCAAGCAAGCCTGGGAGCCGGGGGGAGGTCTGCCAGGCTGTCCCG |
| | | TGCCCTGCTCGGTGGCAGTACAAGCTGGCGGCCTGCAGCGTGAGCTGTGG |
| | | GAGAGGGGTCGTGCGGAGGATCCTGTATTGTGCCCGGGCCCATGGGGAGG |
| | | ACGATGGTGAGGAGATCCTGTTGGACACCCAGTGCCAGGGGCTGCCTCGC |
| | | CCGGAACCCCAGGAGGCCTGCAGCCTGGAGCCCTGCCCACCTAGGTGGAA |
| | | AGTCATGTCCCTTGGCCCATGTTCGGCCAGCTGTGGCCTTGGCACTGCTA |
| | | GACGCTCGGTGGCCTGTGTGCAGCTCGACCAAGGCCAGGACGTGGAGGTG |
| | | GACGAGGCGGCCTGTGCGGCGCTGGTGCGGCCCGAGGCCAGTGTCCCCTG |
| | | TCTCATTGCCGACTGCACCTACCGCTGGCATGTTGGCACCTGGATGGAGT |
| | | GCTCTGTTTCCTGTGGGGATGGCATCCAGCGCCGGCGTGACACCTGCCTC |
| | | GGACCCCAGGCCCAGGCGCCTGTGCCAGCTGATTTCTGCCAGCACTTGCC |
| | | CAAGCCGGTGACTGTGCGTGGCTGCTGGGCTGGGCCCTGTGTGGGACAGG |
| | | GTACGCCCAGCCTGGTGCCCCACGAAGAAGCCGCTGCTGTGGGACGGACC |
| | | ACAGCCACCCCTGCTGGTGCCTCCCTGGAGTGGTCCCAGGCCCGGGGCCT |
| | | GCTCTTCTCCCCGGCTCCCCAGCCTCGGCGGCTCCTGCCCGGGCCCCAGG |
| | | AAAACTCAGTGCAGTCCAGTGCCTGTGGCAGGCAGCACCTTGAGCCAACA |
| | | GGAACCATTGACATGCGAGGCCCAGGGGAGGCAGACTGTGCAGTGGCCAT |
| | | TGGGGGGCCCCTCGGGGAGGTGGTGACCCTCCGCGTCCTTGAGAGTTCTC |
| | | TCAACTGCAGTGCGGGGGACATGTTGCTGCTTTGGGGCCGGCTCACCTGG |
| | | AGGAAGATGTGCAGGAAGCTGTTGGACATGACTTTCAGCTCCAAGACCAA |
| | | CACGCTGGTGGTGAGGCAGCGCTGCGGGCGGCCAGGAGGTGGGGTGCTGC |
| | | TGCGGTATGGGAGCCAGCTTGCTCCTGAAACCTTCTACAGAGAATGTGAC |
| | | ATGCAGCTCTTTGGGCCCTGGGGTGAAATCGTGAGCCCCTCGCTGAGTCC |
| | | AGCCACGAGTAATGCAGGGGGCTGCCGGCTCTTCATTAATGTGGCTCCGC |
| | | ACGCACGGATTGCCATCCATGCCCTGGCCACCAACATGGGCGCTGGGACC |
| | | GAGGGAGCCAATGCCAGCTACATCTTGATCCGGGACACCCACAGCTTGAG |
| | | GACCACAGCGTTCCATGGGCAGCAGGTGCTCTACTGGGAGTCAGAGAGCA |
| | | GCCAGGCTGAGATGGAGTTCAGCGAGGGCTTCCTGAAGGCTCAGGCCAGC |
| | | CTGCGGGGCCAGTACTGGACCCTCCAATCATGGGTACCGGAGATGCAGGA |
| | | CCCTCAGTCCTGGAAGGGAAAGGAAGGAACCTCTAGAGGGCCCTTCGAAC |
| | | AAAAACTCATCTCAGAAGAGGATCTGAATATGCATACCGGTCATCATCAC |
| | | CATCACCAT |
| 90 | Exemplified P1154V | ATGCACCAGCGTCACCCCCGGGCAAGATGCCCTCCCCTCTGTGTGGCCGG |
| | variant nucleotide | AATCCTTGCCTGTGGCTTTCTCCTGGGCTGCTGGGGACCCTCCCATTTCC |
| | sequence | AGCAGAGCTGTCTTCAGGCTTTGGAGCCACAGGCCGTGTCTTCTTACTTG |
| | | AGCCCTGGTGCTCCCTTAAAAGGCCGCCCTCCTTCCCCTGGCTTCCAGAG |
| | | GCAGAGGCAGAGGCAGAGGCGGGCTGCAGGCGGCATCCTACACCTGGAGC |
| | | TGCTGGTGGCCGTGGGCCCCGATGTCTTCCAGGCTCACCAGGAGGACACA |
| | | GAGCGCTATGTGCTCACCAACCTCAACATCGGGGCAGAACTGCTTCGGGA |
| | | CCCGTCCCTGGGGGCTCAGTTTCGGGTGCACCTGGTGAAGATGGTCATTC |
| | | TGACAGAGCCTGAGGGTGCTCCAAATATCACAGCCAACCTCACCTCGTCC |
| | | CTGCTGAGCGTCTGTGGGTGGAGCCAGACCATCAACCCTGAGGACGACAC |
| | | GGATCCTGGCCATGCTGACCTGGTCCTCTATATCACTAGGTTTGACCTGG |
| | | AGTTGCCTGATGGTAACCGGCAGGTGCGGGGCGTCACCCAGCTGGGGGGT |
| | | GCCTGCTCCCCAACCTGGAGCTGCCTCATTACCGAGGACACTGGCTTCGA |
| | | CCTGGGAGTCACCATTGCCCATGAGATTGGGCACAGCTTCGGCCTGGAGC |
| | | ACGACGGCGCGCCCGGCAGCGGCTGCGGCCCCAGCGGACACGTGATGGCT |
| | | TCGGACGGCGCCGCGCCCCGCGCCGGCCTCGCCTGGTCCCCCTGCAGCCG |
| | | CCGGCAGCTGCTGAGCCTGCTCAGCGCAGGACGGGCGCGCTGCGTGTGGG |
| | | ACCCGCCGCGGCCTCAACCCGGGTCCGCGGGGCACCCGCCGGATGCGCAG |
| | | CCTGGCCTCTACTACAGCGCCAACGAGCAGTGCCGCGTGGCCTTCGGCCC |
| | | CAAGGCTGTCGCCTGCACCTTCGCCAGGGAGCACCTGGATATGTGCCAGG |
| | | CCCTCTCCTGCCACACAGACCCGCTGGACCAAAGCAGCTGCAGCCGCCTC |
| | | CTCGTTCCTCTCCTGGATGGGACAGAATGTGGCGTGGAGAAGTGGTGCTC |
| | | CAAAGGTCGCTGCCGCTCCCTGGTGGAGCTGACCCCCATAGCAGCAGTGC |
| | | ATGGGCGCTGGTCTAGCTGGGGTCCCCGAAGTCCTTGCTCCCGCTCCTGC |
| | | GGAGGAGGTGTGGTCACCAGGAGGCGGCAGTGCAACAACCCCAGACCTGC |
| | | CTTTGGGGGGCGTGCATGTGTTGGTGCTGACCTCCAGGCCGAGATGTGCA |
| | | ACACTCAGGCCTGCGAGAAGACCCAGCTGGAGTTCATGTCGCAACAGTGC |
| | | GCCAGGACCGACGGCCAGCCGCTGCGCTCCTCCCCTGGGGGCGCCTCCTT |
| | | CTACCACTGGGGTGCTGCTGTACCACACAGCCAAGGGGATGCTCTGTGCA |
| | | GACACATGTGCCGGGCCATTGGCGAGAGCTTCATCATGAAGCGTGGAGAC |
| | | AGCTTCCTCGATGGGACCCGGTGTATGCCAAGTGGCCCCCGGGAGGACGG |
| | | GACCCTGAGCCTGTGTGTGTCGGGCAGCTGCAGGACATTTGGCTGTGATG |
| | | GTAGGATGGACTCCCAGCAGGTATGGGACAGGTGCCAGGTGTGTGGTGGG |
| | | GACAACAGCACGTGCAGCCCACGGAAGGGCTCTTTCACAGCTGGCAGAGC |
| | | GAGAGAATATGTCACGTTTCTGACAGTTACCCCCAACCTGACCAGTGTCT |
| | | ACATTGCCAACCACAGGCCTCTCTTCACACACTTGGCGGTGAGGATCGGA |
| | | GGGCGCTATGTCGTGGCTGGGAAGATGAGCATCTCCCCTAACACCACCTA |
| | | CCCCTCCCTCCTGGAGGATGGTCGTGTCGAGTACAGAGTGGCCCTCACCG |
| | | AGGACCGGCTGCCCCGCCTGGAGGAGATCCGCATCTGGGGACCCCTCCAG |
| | | GAAGATGCTGACATCCAGGTTTACAGGCGGTATGGCGAGGAGTATGGCAA |
| | | CCTCACCCGCCCAGACATCACCTTCACCTACTTCCAGCCTAAGCCACGGC |
| | | AGGCCTGGGTGTGGGCCGCTGTGCGTGGGCCCTGCTCGGTGAGCTGTGGG |
| | | GCAGGGCTGCGCTGGGTAAACTACAGCTGCCTGGACCAGGCCAGGAAGGA |
| | | GTTGGTGGAGACTGTCCAGTGCCAAGGGAGCCAGCAGCCACCAGCGTGGC |
| | | CAGAGGCCTGCGTGCTCGAACCCTGCCCTCCCTACTGGGCGGTGGGAGAC |
| | | TTCGGCCCATGCAGCGCCTCCTGTGGGGGTGGCCTGGGGGAGCGGCCAGT |
| | | GCGCTGCGTGGAGGCCCAGGGCAGCCTCCTGAAGACATTGCCCCCAGCCC |
| | | GGTGCAGAGCAGGGGCCCAGCAGCCAGCTGTGGCGCTGGAAACCTGCAAC |
| | | CCCCAGCCCTGCCCTGCCAGGTGGGAGGTGTCAGAGCCCAGCTCATGCAC |
| | | ATCAGCTGGTGGAGCAGGCCTGGCCTTGGAGAACGAGACCTGTGTGCCAG |
| | | GGGCAGATGGCCTGGAGGCTCCAGTGACTGAGGGGCCTGGCTCCGTAGAT |
| | | GAGAAGCTGCCTGCCCCTGAGCCCTGTGTCGGGATGTCATGTCCTCCAGG |
| | | CTGGGGCCATCTGGATGCCACCTCTGCAGGGGAGAAGGCTCCCTCCCCAT |
| | | GGGGGAGCATCAGGACGGGGGCTCAAGCTGCACACGTGTGGACCCCTGCG |
| | | GCAGGGTCGTGCTCCGTCTCCTGCGGGCGAGGTCTGATGGAGCTCCGTTT |
| | | CCTGTGCATGGACTCTGCCCTCAGGGTGCCTGTCCAGGAAGAGCTGTGTG |
| | | GCCTGGCAAGCAAGCCTGGGAGCCGGCGGGAGGTCTGCCAGGCTGTCCCG |
| | | TGCCCTGCTCGGTGGCAGTACAAGCTGGCGGCCTGCAGCGTGAGCTGTGG |
| | | GAGAGGGGTCGTGCGGAGGATCCTGTATTGTGCCCGGGCCCATGGGGAGG |
| | | ACGATGGTGAGGAGATCCTGTTGGACACCCAGTGCCAGGGGCTGCCTCGC |
| | | CCGGAACCCCAGGAGGCCTGCAGCCTGGAGCCCTGCCCACCTAGGTGGAA |
| | | AGTCATGTCCCTTGGCCCATGTTCGGCCAGCTGTGGCCTTGGCACTGCTA |
| | | GACGCTCGGTGGCCTGTGTGCAGCTCGACCAAGGCCAGGACGTGGAGGTG |
| | | GACGAGGCGGCCTGTGCGGCGCTGGTGCGGCCCGAGGCCAGTGTCCCCTG |
| | | TCTCATTGCCGACTGCACCTACCGCTGGCATGTTGGCACCTGGATGGAGT |
| | | GCTCTGTTTCCTGTGGGGATGGCATCCAGCGCCGGCGTGACACCTGCCTC |
| | | GGACCCCAGGCCCAGGCGCCTGTGCCAGCTGATTTCTGCCAGCACTTGCC |
| | | CAAGCCGGTGACTGTGCGTGGCTGCTGGGCTGGGCCCTGTGTGGGACAGG |
| | | GTACGCCCAGCCTGGTGCCCCACGAAGAAGCCGCTGCTCCAGGACGGACC |
| | | ACAGCCACCGTGGCTGGTGCCTCCCTGGAGTGGTCCCAGGCCCGGGGCCT |
| | | GCTCTTCTCCCCGGCTCCCCAGCCTCGGCGGCTCCTGCCCGGGCCCCAGG |
| | | AAAACTCAGTGCAGTCCAGTGCCTGTGGCAGGCAGCACCTTGAGCCAACA |
| | | GGAACCATTGACATGCGAGGCCCAGGGCAGGCAGACTGTGCAGTGGCCAT |
| | | TGGGGGGCCCCTCGGGGAGGTGGTGACCCTCCGCGTCCTTGAGAGTTCTC |
| | | TCAACTGGAGTGCGGGGGACATGTTGCTGCTTTGGGGCCGGCTCACCTGG |
| | | AGGAAGATGTGCAGGAAGCTGTTGGACATGACTTTCAGCTCCAAGACCAA |
| | | CACGCTGGTGGTGAGGCAGCGCTGCGGGCGGCCAGGAGGTGGGGTGCTGC |
| | | TGCGGTATGGGAGCCAGCTTGCTCCTGAAACCTTCTACAGAGAATGTGAC |
| | | ATGCAGCTCTTTGGGCCCTGGGGTGAAATCGTGAGCCCCTCGCTGAGTCC |
| | | AGCCACGAGTAATGCAGGGGGCTGCCGGCTCTTCATTAATGTGGCTCCGC |
| | | ACGCACGGATTGCCATCCATGCCCTGGCCACCAACATGGGCGCTGGGACC |
| | | GAGGGAGCCAATGCCAGCTACATCTTGATCCGGGACACCCACAGCTTGAG |
| | | GACCACAGCGTTCCATGGGCAGCAGGTGCTCTACTGGGAGTCAGAGAGCA |
| | | GCCAGGCTGAGATGGAGTTCAGCGAGGGCTTCCTGAAGGCTCAGGCCAGC |
| | | CTGCGGGGCCAGTACTGGACCCTCCAATCATGGGTACCGGAGATGCAGGA |
| | | CCCTCAGTCCTGGAAGGGAAAGGAAGGAACCTCTAGAGGGCCCTTCGAAC |
| | | AAAAACTCATCTCAGAAGAGGATCTGAATATGCATACCGGTCATCATCAC |
| | | CATCACCAT |
| 91 | variant nucleotide | ATGCACCAGCGTCACCCCCGGGCAAGATGCCCTCCCCTCTGTGTGGCCGG |
| | sequence | AATCCTTGCCTGTGGCTTTCTCCTGGGCTGCTGGGGACCCTCCCATTTCC |
| | Exemplified P1171V | AGCAGAGCTGTCTTCAGGCTTTGGAGCCACAGGCCGTGTCTTCTTACTTG |
| | | AGCCCTGGTGCTCCCTTAAAAGGCCGCCCTCCTTCCCCTGGCTTCCAGAG |
| | | GCAGAGGCAGAGGCAGAGGGGGGCTGCAGGCGGCATCCTACACCTGGAGC |
| | | TGCTGGTGGCCGTGGGCCCCGATGTCTTCCAGGCTCACCAGGAGGACACA |
| | | GAGCGCTATGTGCTCACCAACCTCAACATCGGGGCAGAACTGCTTCGGGA |
| | | CCCGTCCCTGGGGGCTCAGTTTCGGGTGCACCTGGTGAAGATGGTCATTC |
| | | TGACAGAGCCTGAGGGTGCTCCAAATATCACAGCCAACCTCACCTCGTCC |
| | | CTGCTGAGCGTCTGTGGGTGGAGCCAGACCATCAACCCTGAGGACGACAC |
| | | GGATCCTGGCCATGCTGACCTGGTCCTCTATATCACTAGGTTTGACCTGG |
| | | AGTTGCCTGATGGTAACCGGCAGGTGCGGGGCGTCACCCAGCTGGGGGGT |
| | | GCCTGCTCCCCAACCTGGAGCTGCCTCATTACCGAGGACACTGGCTTCGA |
| | | CCTGGGAGTCACCATTGCCCATGAGATTGGGCACAGCTTCGGCCTGGAGC |
| | | ACGACGGCGCGCCCGGCAGCGGCTGCGGCCCCAGCGGACACGTGATGGCT |
| | | TCGGACGGCGCCGCGCCCCGCGCCGGCCTCGCCTGGTCCCCCTGCAGCCG |
| | | CCGGCAGCTGCTGAGCCTGCTCAGCGCAGGACGGGCGCGCTGCGTGTGGG |
| | | ACCCGCCGCGGCCTCAACCCGGGTCCGCGGGGCACCCGCCGGATGCGCAG |
| | | CCTGGCCTCTACTACAGCGCCAACGAGCAGTGCCGCGTGGCCTTCGGCCC |
| | | CAAGGCTGTCGCCTGCACCTTCGCCAGGGAGCACCTGGATATGTGCCAGG |
| | | CCCTCTCCTGCCACACAGACCCGCTGGACCAAAGCAGCTGCAGCCGCCTC |
| | | CTCGTTCCTCTCCTGGATGGGACAGAATGTGGCGTGGAGAAGTGGTGCTC |
| | | CAAAGGTCGCTGCCGCTCCCTGGTGGAGCTGACCCCCATAGCAGCAGTGC |
| | | ATGGGCGCTGGTCTAGCTGGGGTCCCCGAAGTCCTTGCTCCCGCTCCTGC |
| | | GGAGGAGGTGTGGTCACCAGGAGGCGGCAGTGCAACAACCCCAGACCTGC |
| | | CTTTGGGGGGCGTGCATGTGTTGGTGCTGACCTCCAGGCCGAGATGTGCA |
| | | ACACTCAGGCCTGCGAGAAGACCCAGCTGGAGTTCATGTCGCAACAGTGC |
| | | GCCAGGACCGACGGCCAGCCGCTGCGCTCCTCCCCTGGCGGCGCCTCCTT |
| | | CTACCACTGGGGTGCTGCTGTACCACACAGCCAAGGGGATGCTCTGTGCA |
| | | GACACATGTGCCGGGCCATTGGCGAGAGCTTCATCATGAAGCGTGCCCTG |
| | | AGCCTGTGTGTGTCGGGCAGCTGCAGGACATTTGGCTGTGATGGTAGGAT |
| | | GGAGAGACAGCTTCCTCGATGGGACCCGGTGTATGCCAAGTGGCCCCCGG |
| | | GAGGACGGGACTCCCAGCAGGTATGGGACAGGTGCCAGGTGTGTGGTGGG |
| | | GACAACAGCACGTGCAGCCCACGGAAGGGCTCTTTCACAGCTGGCAGAGC |
| | | GAGAGAATATGTCACGTTTCTGACAGTTACCCCCAACCTGACCAGTGTCT |
| | | ACATTGCCAACCACAGGCCTCTCTTCACACACTTGGCGGTGAGGATCGGA |
| | | GGGCGCTATGTCGTGGCTGGGAAGATGAGCATCTCCCCTAACACCACCTA |
| | | CCCCTCCCTCCTGGAGGATGGTCGTGTCGAGTACAGAGTGGCCCTCACCG |
| | | AGGACCGGCTGCCCCGCCTGGAGGAGATCCGCATCTGGGGACCCCTCCAG |
| | | GAAGATGCTGACATCCAGGTTTACAGGCGGTATGGCGAGGAGTATGGCAA |
| | | CCTCACCCGCCCAGACATCACCTTCACCTACTTCCAGCCTAAGCCACGGC |
| | | AGGCCTGGGTGTGGGCCGCTGTGCGTGGGCCCTGCTCGGTGAGCTGTGGG |
| | | GCAGGGCTGCGCTGGGTAAACTACAGCTGCCTGGACCAGGCCAGGAAGGA |
| | | GTTGGTGGAGACTGTCCAGTGCCAAGGGAGCCAGCAGCCACCAGCGTGGC |
| | | CAGAGGCCTGCGTGCTCGAACCCTGCCCTCCCTACTGGGCGGTGGGAGAC |
| | | TTCGGCCCATGCAGCGCCTCCTGTGGGGGTGGCCTGGGGGAGCGGCCAGT |
| | | GCGCTGCGTGGAGGCCCAGGGCAGCCTCCTGAAGACATTGCCCCCAGCCC |
| | | GGTGCAGAGCAGGGGCCCAGCAGCCAGCTGTGGCGCTGGAAACCTGCAAC |
| | | CCCCAGCCCTGCCCTGCCAGGTGGGAGGTGTCAGAGCCCAGCTCATGCAC |
| | | ATCAGCTGGTGGAGCAGGCCTGGCCTTGGAGAACGAGACCTGTGTGCCAG |
| | | GGGCAGATGGCCTGGAGGCTCCAGTGACTGAGGGGCCTGGCTCCGTAGAT |
| | | GAGAAGCTGCCTGCCCCTGAGCCCTGTGTCGGGATGTCATGTCCTCCAGG |
| | | CTGGGGCCATCTGGATGCCACCTCTGCAGGGGAGAAGGCTCCCTCCCCAT |
| | | GGGGCAGCATCAGGACGGGGGCTCAAGCTGCACACGTGTGGACCCCTGCG |
| | | GCAGGGTCGTGCTCCGTCTCCTGCGGGCGAGGTCTGATGGAGCTCCGTTT |
| | | CCTGTGCATGGACTCTGCCCTCAGGGTGCCTGTCCAGGAAGAGCTGTGTG |
| | | GCCTGGCAAGCAAGCCTGGGAGCCGGCGGGAGGTCTGCCAGGCTGTCCCG |
| | | TGCCCTGCTCGGTGGCAGTACAAGCTGGCGGCCTGCAGCGTGAGCTGTGG |
| | | GAGAGGGGTCGTGCGGAGGATCCTGTATTGTGCCCGGGCCCATGGGGAGG |
| | | ACGATGGTGAGGAGATCCTGTTGGACACCCAGTGCCAGGGGCTGCCTCGC |
| | | CCGGAACCCCAGGAGGCCTGCAGCCTGGAGCCCTGCCCACCTAGGTGGAA |
| | | AGTCATGTCCCTTGGCCCATGTTCGGCCAGCTGTGGCCTTGGCACTGCTA |
| | | GACGCTCGGTGGCCTGTGTGCAGCTCGACCAAGGCCAGGACGTGGAGGTG |
| | | GACGAGGCGGCCTGTGCGGCGCTGGTGCGGCCCGAGGCCAGTGTCCCCTG |
| | | TCTCATTGCCGACTGCACCTACCGCTGGCATGTTGGCACCTGGATGGAGT |
| | | GCTCTGTTTCCTGTGGGGATGGCATCCAGCGCCGGCGTGACACCTGCCTC |
| | | GGACCCCAGGCCCAGGCGCCTGTGCCAGCTGATTTCTGCCAGCACTTGCC |
| | | CAAGCCGGTGACTGTGCGTGGCTGCTGGGCTGGGCCCTGTGTGGGACAGG |
| | | GTACGCCCAGCCTGGTGCCCCACGAAGAAGCCGCTGCTCCAGGACGGACC |
| | | ACAGCCACCCCTGCTGGTGCCTCCCTGGAGTGGTCCCAGGCCCGGGGCCT |
| | | GCTCTTCTCCGTGGCTCCCCAGCCTCGGGGGCTCCTGCCCGGGCCCCAGG |
| | | AAAACTCAGTGCAGTCCAGTGCCTGTGGCAGGCAGCACCTTGAGCCAACA |
| | | GGAACCATTGACATGCGAGGCCCAGGGCAGGCAGACTGTGCAGTGGCCAT |
| | | TGGGCGGCCCCTCGGGGAGGTGGTGACCCTCCGCGTCCTTGAGAGTTCTC |
| | | TCAACTGCAGTGCGGGGGACATGTTGCTGCTTTGGGGCCGGCTCACCTGG |
| | | AGGAAGATGTGCAGGAAGCTGTTGGACATGACTTTCAGCTCCAAGACCAA |
| | | CACGCTGGTGGTGAGGCAGCGCTGCGGGGGGCCAGGAGGTGGGGTGCTGC |
| | | TGCGGTATGGGAGCCAGCTTGCTCCTGAAACCTTCTACAGAGAATGTGAC |
| | | ATGCAGCTCTTTGGGCCCTGGGGTGAAATCGTGAGCCCCTCGCTGAGTCC |
| | | AGCCACGAGTAATGCAGGGGGCTGCCGGCTCTTCATTAATGTGGCTCCGC |
| | | ACGCACGGATTGCCATCCATGCCCTGGCCACCAACATGGGCGCTGGGACC |
| | | GAGGGAGCCAATGCCAGCTACATCTTGATCCGGGACACCCACAGCTTGAG |
| | | GACCACAGCGTTCCATGGGCAGCAGGTGCTCTACTGGGAGTCAGAGAGCA |
| | | GCCAGGCTGAGATGGAGTTCAGCGAGGGCTTCCTGAAGGCTCAGGCCAGC |
| | | CTGCGGGGCCAGTACTGGACCCTCCAATCATGGGTACCGGAGATGCAGGA |
| | | CCCTCAGTCCTGGAAGGGAAAGGAAGGAACCTCTAGAGGGCCCTTCGAAC |
| | | AAAAACTCATCTCAGAAGAGGATCTGAATATGCATACCGGTCATCATCAC |
| | | CATCACCAT |
| 92 | variant nucleotide | ATGCACCAGCGTCACCCCCGGGCAAGATGCCCTCCCCTCTGTGTGGCCGG |
| | sequence | AATCCTTGCCTGTGGCTTTCTCCTGGGCTGCTGGGGACCCTCCCATTTCC |
| | Exemplified P1173V | AGCAGAGCTGTCTTCAGGCTTTGGAGCCACAGGCCGTGTCTTCTTACTTG |
| | | AGCCCTGGTGCTCCCTTAAAAGGCCGCCCTCCTTCCCCTGGCTTCCAGAG |
| | | GCAGAGGCAGAGGCAGAGGGGGGCTGCAGGCGGCATCCTACACCTGGAGC |
| | | TGCTGGTGGCCGTGGGCCCCGATGTCTTCCAGGCTCACCAGGAGGACACA |
| | | GAGCGCTATGTGCTCACCAACCTCAACATCGGGGCAGAACTGCTTCGGGA |
| | | CCCGTCCCTGGGGGCTCAGTTTCGGGTGCACCTGGTGAAGATGGTCATTC |
| | | TGACAGAGCCTGAGGGTGCTCCAAATATCACAGCCAACCTCACCTCGTCC |
| | | CTGCTGAGCGTCTGTGGGTGGAGCCAGACCATCAACCCTGAGGACGACAC |
| | | GGATCCTGGCCATGCTGACCTGGTCCTCTATATCACTAGGTTTGACCTGG |
| | | AGTTGCCTGATGGTAACCGGCAGGTGCGGGGCGTCACCCAGCTGGGCGGT |
| | | GCCTGCTCCCCAACCTGGAGCTGCCTCATTACCGAGGACACTGGCTTCGA |
| | | CCTGGGAGTCACCATTGCCCATGAGATTGGGCACAGCTTCGGCCTGGAGC |
| | | ACGACGGCGCGCCCGGCAGCGGCTGCGGCCCCAGCGGACACGTGATGGCT |
| | | TCGGACGGCGCCGCGCCCCGCGCCGGCCTCGCCTGGTCCCCCTGCAGCCG |
| | | CCGGCAGCTGCTGAGCCTGCTCAGCGCAGGACGGGCGCGCTGCGTGTGGG |
| | | ACCCGCCGCGGCCTCAACCCGGGTCCGCGGGGCACCCGCCGGATGCGCAG |
| | | CCTGGCCTCTACTACAGCGCCAACGAGCAGTGCCGCGTGGCCTTCGGCCC |
| | | CAAGGCTGTCGCCTGCACCTTCGCCAGGGAGCACCTGGATATGTGCCAGG |
| | | CCCTCTCCTGCCACACAGACCCGCTGGACCAAAGCAGCTGCAGCCGCCTC |
| | | CTCGTTCCTCTCCTGGATGGGACAGAATGTGGCGTGGAGAAGTGGTGCTC |
| | | CAAAGGTCGCTGCCGCTCCCTGGTGGAGCTGACCCCCATAGCAGCAGTGC |
| | | ATGGGCGCTGGTCTAGCTGGGGTCCCCGAAGTCCTTGCTCCCGCTCCTGC |
| | | GGAGGAGGTGTGGTCACCAGGAGGCGGCAGTGCAACAACCCCAGACCTGC |
| | | CTTTGGGGGGCGTGCATGTGTTGGTGCTGACCTCCAGGCCGAGATGTGCA |
| | | ACACTCAGGCCTGCGAGAAGACCCAGCTGGAGTTCATGTCGCAACAGTGC |
| | | GCCAGGACCGACGGCCAGCCGCTGCGCTCCTCCCCTGGGGGCGCCTCCTT |
| | | CTACCACTGGGGTGCTGCTGTACCACACAGCCAAGGGGATGCTCTGTGCA |
| | | GACACATGTGCCGGGCCATTGGCGAGAGCTTCATCATGAAGCGTGCTCCC |
| | | AGCAGGTATGGGACAGGTGCCAGGTGTGTGGTGGGGACAACAGCACGTGC |
| | | AGGAGACAGCTTCCTCGATGGGACCCGGTGTATGCCAAGTGGCCCCCGGG |
| | | AGGACGGGACCCTGAGCCTGTGTGTGTCGGGCAGCTGCAGGACATTTGGC |
| | | TGTGATGGTAGGATGGACCCACGGAAGGGCTCTTTCACAGCTGGCAGAGC |
| | | GAGAGAATATGTCACGTTTCTGACAGTTACCCCCAACCTGACCAGTGTCT |
| | | ACATTGCCAACCACAGGCCTCTCTTCACACACTTGGCGGTGAGGATCGGA |
| | | GGGCGCTATGTCGTGGCTGGGAAGATGAGCATCTCCCCTAACACCACCTA |
| | | CCCCTCCCTCCTGGAGGATGGTCGTGTCGAGTACAGAGTGGCCCTCACCG |
| | | AGGACCGGCTGCCCCGCCTGGAGGAGATCCGCATCTGGGGACCCCTCCAG |
| | | GAAGATGCTGACATCCAGGTTTACAGGCGGTATGGCGAGGAGTATGGCAA |
| | | CCTCACCCGCCCAGACATCACCTTCACCTACTTCCAGCCTAAGCCACGGC |
| | | AGGCCTGGGTGTGGGCCGCTGTGCGTGGGCCCTGCTCGGTGAGCTGTGGG |
| | | GCAGGGCTGCGCTGGGTAAACTACAGCTGCCTGGACCAGGCCAGGAAGGA |
| | | GTTGGTGGAGACTGTCCAGTGCCAAGGGAGCCAGCAGCCACCAGCGTGGC |
| | | CAGAGGCCTGCGTGCTCGAACCCTGCCCTCCCTACTGGGCGGTGGGAGAC |
| | | TTCGGCCCATGCAGCGCCTCCTGTGGGGGTGGCCTGGGGGAGCGGCCAGT |
| | | GCGCTGCGTGGAGGCCCAGGGCAGCCTCCTGAAGACATTGCCCCCAGCCC |
| | | GGTGCAGAGCAGGGGCCCAGCAGCCAGGTGTGGCGCTGGAAACCTGCAAC |
| | | CCCCAGCCCTGCCCTGCCAGGTGGGAGGTGTCAGAGCCCAGCTCATGCAC |
| | | ATCAGCTGGTGGAGCAGGCCTGGCCTTGGAGAACGAGACCTGTGTGCCAG |
| | | GGGCAGATGGCCTGGAGGCTCCAGTGACTGAGGGGCCTGGCTCCGTAGAT |
| | | GAGAAGCTGCCTGCCCCTGAGCCCTGTGTCGGGATGTCATGTCCTCCAGG |
| | | CTGGGGCCATCTGGATGCCACCTCTGCAGGGGAGAAGGCTCCCTCCCCAT |
| | | GGGGCAGCATCAGGACGGGGGCTCAAGCTGCACACGTGTGGACCCCTGCG |
| | | GCAGGGTCGTGCTCCGTCTCCTGCGGGCGAGGTCTGATGGAGCTCCGTTT |
| | | CCTGTGCATGGACTCTGCCCTCAGGGTGCCTGTCCAGGAAGAGCTGTGTG |
| | | GCCTGGCAAGCAAGCCTGGGAGCCGGCGGGAGGTCTGCCAGGCTGTCCCG |
| | | TGCCCTGCTCGGTGGCAGTACAAGCTGGCGGCCTGCAGCGTGAGCTGTGG |
| | | GAGAGGGGTCGTGCGGAGGATCCTGTATTGTGCCCGGGCCCATGGGGAGG |
| | | ACGATGGTGAGGAGATCCTGTTGGACACCCAGTGCCAGGGGCTGCCTCGC |
| | | CCGGAACCCCAGGAGGCCTGCAGCCTGGAGCCCTGCCCACCTAGGTGGAA |
| | | AGTCATGTCCCTTGGCCCATGTTCGGCCAGCTGTGGCCTTGGCACTGCTA |
| | | GACGCTCGGTGGCCTGTGTGCAGCTCGACCAAGGCCAGGACGTGGAGGTG |
| | | GACGAGGCGGCCTGTGCGGCGCTGGTGCGGCCCGAGGCCAGTGTCCCCTG |
| | | TCTCATTGCCGACTGCACCTACCGCTGGCATGTTGGCACCTGGATGGAGT |
| | | GCTCTGTTTCCTGTGGGGATGGCATCCAGCGCCGGCGTGACACCTGCCTC |
| | | GGACCCCAGGCCCAGGCGCCTGTGCCAGCTGATTTCTGCCAGCACTTGCC |
| | | CAAGCCGGTGACTGTGCGTGGCTGCTGGGCTGGGCCCTGTGTGGGACAGG |
| | | GTACGCCCAGCCTGGTGCCCCACGAAGAAGCCGCTGCTCCAGGACGGACC |
| | | ACAGCCACCCCTGCTGGTGCCTCCCTGGAGTGGTCCCAGGCCCGGGGCCT |
| | | GCTCTTCTCCCCGGCTGTGCAGCCTCGGCGGCTCCTGCCCGGGCCCCAGG |
| | | AAAACTCAGTGCAGTCCAGTGCCTGTGGCAGGCAGCACCTTGAGCCAACA |
| | | GGAACCATTGACATGCGAGGCCCAGGGGAGGCAGACTGTGCAGTGGCCAT |
| | | TGGGCGGCCCCTCGGGGAGGTGGTGACCCTCCGCGTCCTTGAGAGTTCTC |
| | | TCAACTGCAGTGCGGGGGACATGTTGCTGCTTTGGGGCCGGCTCACCTGG |
| | | AGGAAGATGTGCAGGAAGCTGTTGGACATGACTTTCAGCTCCAAGACCAA |
| | | CACGCTGGTGGTGAGGCAGCGCTGCGGGGGGCCAGGAGGTGGGGTGCTGC |
| | | TGCGGTATGGGAGCCAGCTTGCTCCTGAAACCTTCTACAGAGAATGTGAC |
| | | ATGCAGCTCTTTGGGCCCTGGGGTGAAATCGTGAGCCCCTCGCTGAGTCC |
| | | AGCCACGAGTAATGCAGGGGGCTGCCGGCTCTTCATTAATGTGGCTCCGC |
| | | ACGCACGGATTGCCATCCATGCCCTGGCCACCAACATGGGCGCTGGGACC |
| | | GAGGGAGCCAATGCCAGCTACATCTTGATCCGGGACACCCACAGCTTGAG |
| | | GACCACAGCGTTCCATGGGCAGCAGGTGCTCTACTGGGAGTCAGAGAGCA |
| | | GCCAGGCTGAGATGGAGTTCAGCGAGGGCTTCCTGAAGGCTCAGGCCAGC |
| | | CTGCGGGGCCAGTACTGGACCCTCCAATCATGGGTACCGGAGATGCAGGA |
| | | CCCTCAGTCCTGGAAGGGAAAGGAAGGAACCTCTAGAGGGCCCTTCGAAC |
| | | AAAAACTCATCTCAGAAGAGGATCTGAATATGCATACCGGTCATCATCAC |
| | | CATCACCAT |
| 93 | Exemplified P1175V | ATGCACCAGCGTCACCCCCGGGCAAGATGCCCTCCCCTCTGTGTGGCCGG |
| | variant nucleotide | AATCCTTGCCTGTGGCTTTCTCCTGGGCTGCTGGGGACCCTCCCATTTCC |
| | sequence | AGCAGAGCTGTCTTCAGGCTTTGGAGCCACAGGCCGTGTCTTCTTACTTG |
| | | AGCCCTGGTGCTCCCTTAAAAGGCCGCCCTCCTTCCCCTGGCTTCCAGAG |
| | | GCAGAGGCAGAGGCAGAGGGGGGCTGCAGGCGGCATCCTACACCTGGAGC |
| | | TGCTGGTGGCCGTGGGCCCCGATGTCTTCCAGGCTCACCAGGAGGACACA |
| | | GAGCGCTATGTGCTCACCAACCTCAACATCGGGGCAGAACTGCTTCGGGA |
| | | CCCGTCCCTGGGGGCTCAGTTTCGGGTGCACCTGGTGAAGATGGTCATTC |
| | | TGACAGAGCCTGAGGGTGCTCCAAATATCACAGCCAACCTCACCTCGTCC |
| | | CTGCTGAGCGTCTGTGGGTGGAGCCAGACCATCAACCCTGAGGACGACAC |
| | | GGATCCTGGCCATGCTGACCTGGTCCTCTATATCACTAGGTTTGACCTGG |
| | | AGTTGCCTGATGGTAACCGGCAGGTGCGGGGCGTCACCCAGCTGGGCGGT |
| | | GCCTGCTCCCCAACCTGGAGCTGCCTCATTACCGAGGACACTGGCTTCGA |
| | | CCTGGGAGTCACCATTGCCCATGAGATTGGGCACAGCTTCGGCCTGGAGC |
| | | ACGACGGCGCGCCCGGCAGCGGCTGCGGCCCCAGCGGACACGTGATGGCT |
| | | TCGGACGGCGCCGCGCCCCGCGCCGGCCTCGCCTGGTCCCCCTGCAGCCG |
| | | CCGGCAGCTGCTGAGCCTGCTCAGCGCAGGACGGGCGCGCTGCGTGTGGG |
| | | ACCCGCCGCGGCCTCAACCCGGGTCCGCGGGGCACCCGCCGGATGCGCAG |
| | | CCTGGCCTCTACTACAGCGCCAACGAGCAGTGCCGCGTGGCCTTCGGCCC |
| | | CAAGGCTGTCGCCTGCACCTTCGCCAGGGAGCACCTGGATATGTGCCAGG |
| | | CCCTCTCCTGCCACACAGACCCGCTGGACCAAAGCAGCTGCAGCCGCCTC |
| | | CTCGTTCCTCTCCTGGATGGGACAGAATGTGGCGTGGAGAAGTGGTGCTC |
| | | CAAAGGTCGCTGCCGCTCCCTGGTGGAGCTGACCCCCATAGCAGCAGTGC |
| | | ATGGGCGCTGGTCTAGCTGGGGTCCCCGAAGTCCTTGCTCCCGCTCCTGC |
| | | GGAGGAGGTGTGGTCACCAGGAGGCGGCAGTGCAACAACCCCAGACCTGC |
| | | CTTTGGGGGGCGTGCATGTGTTGGTGCTGACCTCCAGGCCGAGATGTGCA |
| | | ACACTCAGGCCTGCGAGAAGACCCAGCTGGAGTTCATGTCGCAACAGTGC |
| | | GCCAGGACCGACGGCCAGCCGCTGCGCTCCTCCCCTGGCGGCGCCTCCTT |
| | | CTACCACTGGGGTGCTGCTGTACCACACAGCCAAGGGGATGCTCTGTGCA |
| | | GACACATGTGCCGGGCCATTGGCGAGAGCTTCATCATGAAGCGTGGAGAC |
| | | AGCTTCCTCGATGGGACCCGGTGTATGCCAAGTGGCCCCCGGGAGGACGG |
| | | GACCCTGAGCCTGTGTGTGTCGGGCAGCTGCAGGACATTTGGCTGTGATG |
| | | GTAGGATGGACTCCCAGCAGGTATGGGACAGGTGCCAGGTGTGTGGTGGG |
| | | GACAACAGCACGTGCAGCCCACGGAAGGGCTCTTTCACAGCTGGCAGAGC |
| | | GAGAGAATATGTCACGTTTCTGACAGTTACCCCCAACCTGACCAGTGTCT |
| | | ACATTGCCAACCACAGGCCTCTCTTCACACACTTGGCGGTGAGGATCGGA |
| | | GGGCGCTATGTCGTGGCTGGGAAGATGAGCATCTCCCCTAACACCACCTA |
| | | CCCCTCCCTCCTGGAGGATGGTCGTGTCGAGTACAGAGTGGCCCTCACCG |
| | | AGGACCGGCTGCCCCGCCTGGAGGAGATCCGCATCTGGGGACCCCTCCAG |
| | | GAAGATGCTGACATCCAGGTTTACAGGCGGTATGGCGAGGAGTATGGCAA |
| | | CCTCACCCGCCCAGACATCACCTTCACCTACTTCCAGCCTAAGCCACGGC |
| | | AGGCCTGGGTGTGGGCCGCTGTGCGTGGGCCCTGCTCGGTGAGCTGTGGG |
| | | GCAGGGCTGCGCTGGGTAAACTACAGCTGCCTGGACCAGGCCAGGAAGGA |
| | | GTTGGTGGAGACTGTCCAGTGCCAAGGGAGCCAGCAGCCACCAGCGTGGC |
| | | CAGAGGCCTGCGTGCTCGAACCCTGCCCTCCCTACTGGGCGGTGGGAGAC |
| | | TTCGGCCCATGGAGCGCCTCCTGTGGGGGTGGCCTGGGGGAGGGGCCAGT |
| | | GCGCTGCGTGGAGGCCCAGGGCAGCCTCCTGAAGACATTGCCCCCAGCCC |
| | | GGTGCAGAGCAGGGGCCCAGCAGCCAGCTGTGGCGCTGGAAACCTGCAAC |
| | | CCCCAGCCCTGCCCTGCCAGGTGGGAGGTGTCAGAGCCCAGCTCATGCAC |
| | | ATCAGCTGGTGGAGCAGGCCTGGCCTTGGAGAACGAGACCTGTGTGCCAG |
| | | GGGCAGATGGCCTGGAGGCTCCAGTGACTGAGGGGCCTGGCTCCGTAGAT |
| | | GAGAAGCTGCCTGCCCCTGAGCCCTGTGTCGGGATGTCATGTCCTCCAGG |
| | | CTGGGGCCATCTGGATGCCACCTCTGCAGGGGAGAAGGCTCCCTCCCCAT |
| | | GGGGCAGCATCAGGACGGGGGCTCAAGCTGCACACGTGTGGACCCCTGCG |
| | | GCAGGGTCGTGCTCCGTCTCCTGCGGGCGAGGTCTGATGGAGCTCCGTTT |
| | | CCTGTGCATGGACTCTGCCCTCAGGGTGCCTGTCCAGGAAGAGCTGTGTG |
| | | GCCTGGCAAGCAAGCCTGGGAGCCGGCGGGAGGTCTGCCAGGCTGTCCCG |
| | | TGCCCTGCTCGGTGGCAGTACAAGCTGGCGGCCTGCAGCGTGAGCTGTGG |
| | | GAGAGGGGTCGTGCGGAGGATCCTGTATTGTGCCCGGGCCCATGGGGAGG |
| | | ACGATGGTGAGGAGATCCTGTTGGACACCCAGTGCCAGGGGCTGCCTCGC |
| | | CCGGAACCCCAGGAGGCCTGCAGCCTGGAGCCCTGCCCACCTAGGTGGAA |
| | | AGTCATGTCCCTTGGCCCATGTTCGGCCAGCTGTGGCCTTGGCACTGCTA |
| | | GACGCTCGGTGGCCTGTGTGCAGCTCGACCAAGGCCAGGACGTGGAGGTG |
| | | GACGAGGCGGCCTGTGCGGCGCTGGTGCGGCCCGAGGCCAGTGTCCCCTG |
| | | TCTCATTGCCGACTGCACCTACCGCTGGCATGTTGGCACCTGGATGGAGT |
| | | GCTCTGTTTCCTGTGGGGATGGCATCCAGCGCCGGCGTGACACCTGCCTC |
| | | GGACCCCAGGCCCAGGCGCCTGTGCCAGCTGATTTCTGCCAGCACTTGCC |
| | | CAAGCCGGTGACTGTGCGTGGCTGCTGGGCTGGGCCCTGTGTGGGACAGG |
| | | GTACGCCCAGCCTGGTGCCCCACGAAGAAGCCGCTGCTCCAGGACGGACC |
| | | ACAGCCACCCCTGCTGGTGCCTCCCTGGAGTGGTCCCAGGCCCGGGGCCT |
| | | GCTCTTCTCCCCGGCTCCCCAGGTGCGGCGGCTCCTGCCCGGGCCCCAGG |
| | | AAAACTCAGTGCAGTCCAGTGCCTGTGGCAGGCAGCACCTTGAGCCAACA |
| | | GGAACCATTGACATGCGAGGCCCAGGGCAGGCAGACTGTGCAGTGGCCAT |
| | | TGGGGGGCCCCTCGGGGAGGTGGTGACCCTCCGCGTCCTTGAGAGTTCTC |
| | | TCAACTGCAGTGCGGGGGACATGTTGCTGCTTTGGGGCCGGCTCACCTGG |
| | | AGGAAGATGTGCAGGAAGCTGTTGGACATGACTTTCAGCTCCAAGACCAA |
| | | CACGCTGGTGGTGAGGCAGCGCTGCGGGGGGCCAGGAGGTGGGGTGCTGC |
| | | TGCGGTATGGGAGCCAGCTTGCTCCTGAAACCTTCTACAGAGAATGTGAC |
| | | ATGCAGCTCTTTGGGCCCTGGGGTGAAATCGTGAGCCCCTCGCTGAGTCC |
| | | AGCCACGAGTAATGCAGGGGGCTGCCGGCTCTTCATTAATGTGGCTCCGC |
| | | ACGCACGGATTGCCATCCATGCCCTGGCCACCAACATGGGCGCTGGGACC |
| | | GAGGGAGCCAATGCCAGCTACATCTTGATCCGGGACACCCACAGCTTGAG |
| | | GACCACAGCGTTCCATGGGCAGCAGGTGCTCTACTGGGAGTCAGAGAGCA |
| | | GCCAGGCTGAGATGGAGTTCAGCGAGGGCTTCCTGAAGGCTCAGGCCAGC |
| | | CTGCGGGGCCAGTACTGGACCCTCCAATCATGGGTACCGGAGATGCAGGA |
| | | CCCTCAGTCCTGGAAGGGAAAGGAAGGAACCTCTAGAGGGCCCTTCGAAC |
| | | AAAAACTCATCTCAGAAGAGGATCTGAATATGCATACCGGTCATCATCAC |
| | | CATCACCAT |
| 94 | Exemplified P1180V | ATGCACCAGCGTCACCCCCGGGCAAGATGCCCTCCCCTCTGTGTGGCCGG |
| | variant nucleotide | AATCCTTGCCTGTGGCTTTCTCCTGGGCTGCTGGGGACCCTCCCATTTCC |
| | sequence | AGCAGAGCTGTCTTCAGGCTTTGGAGCCACAGGCCGTGTCTTCTTACTTG |
| | | AGCCCTGGTGCTCCCTTAAAAGGCCGCCCTCCTTCCCCTGGCTTCCAGAG |
| | | GCAGAGGCAGAGGCAGAGGGGGGCTGCAGGCGGCATCCTACACCTGGAGC |
| | | TGCTGGTGGCCGTGGGCCCCGATGTCTTCCAGGCTCACCAGGAGGACACA |
| | | GAGCGCTATGTGCTCACCAACCTCAACATCGGGGCAGAACTGCTTCGGGA |
| | | CCCGTCCCTGGGGGCTCAGTTTCGGGTGCACCTGGTGAAGATGGTCATTC |
| | | TGACAGAGCCTGAGGGTGCTCCAAATATCACAGCCAACCTCACCTCGTCC |
| | | CTGCTGAGCGTCTGTGGGTGGAGCCAGACCATCAACCCTGAGGACGACAC |
| | | GGATCCTGGCCATGCTGACCTGGTCCTCTATATCACTAGGTTTGACCTGG |
| | | AGTTGCCTGATGGTAACCGGCAGGTGCGGGGCGTCACCCAGCTGGGCGGT |
| | | GCCTGCTCCCCAACCTGGAGCTGCCTCATTACCGAGGACACTGGCTTCGA |
| | | CCTGGGAGTCACCATTGCCCATGAGATTGGGCACAGCTTCGGCCTGGAGC |
| | | ACGACGGCGCGCCCGGCAGCGGCTGCGGCCCCAGCGGACACGTGATGGCT |
| | | TCGGACGGCGCCGCGCCCCGCGCCGGCCTCGCCTGGTCCCCCTGCAGCCG |
| | | CCGGCAGCTGCTGAGCCTGCTCAGCGCAGGACGGGCGCGCTGCGTGTGGG |
| | | ACCCGCCGCGGCCTCAACCCGGGTCCGCGGGGCACCCGCCGGATGCGCAG |
| | | CCTGGCCTCTACTACAGCGCCAACGAGCAGTGCCGCGTGGCCTTCGGCCC |
| | | CAAGGCTGTCGCCTGCACCTTCGCCAGGGAGCACCTGGATATGTGCCAGG |
| | | CCCTCTCCTGCCACACAGACCCGCTGGACCAAAGCAGCTGCAGCCGCCTC |
| | | CTCGTTCCTCTCCTGGATGGGACAGAATGTGGCGTGGAGAAGTGGTGCTC |
| | | CAAAGGTCGCTGCCGCTCCCTGGTGGAGCTGACCCCCATAGCAGCAGTGC |
| | | ATGGGCGCTGGTCTAGCTGGGGTCCCCGAAGTCCTTGCTCCCGCTCCTGC |
| | | GGAGGAGGTGTGGTCACCAGGAGGCGGCAGTGCAACAACCCCAGACCTGC |
| | | CTTTGGGGGGCGTGCATGTGTTGGTGCTGACCTCCAGGCCGAGATGTGCA |
| | | ACACTCAGGCCTGCGAGAAGACCCAGCTGGAGTTCATGTCGCAACAGTGC |
| | | GCCAGGACCGACGGCCAGCCGCTGCGCTCCTCCCCTGGCGGCGCCTCCTT |
| | | CTACCACTGGGGTGCTGCTGTACCACACAGCCAAGGGGATGCTCTGTGCA |
| | | GACACATGTGCCGGGCCATTGGCGAGAGCTTCATCATGAAGCGTGGAGAC |
| | | AGCTTCCTCGATGGGACCCGGTGTATGCCAAGTGGCCCCCGGGAGGACGG |
| | | GACCCTGAGCCTGTGTGTGTCGGGCAGCTGCAGGACATTTGGCTGTGATG |
| | | GTAGGATGGACTCCCAGCAGGTATGGGACAGGTGCCAGGTGTGTGGTGGG |
| | | GACAACAGCACGTGCAGCCCACGGAAGGGCTCTTTCACAGCTGGCAGAGC |
| | | GAGAGAATATGTCACGTTTCTGACAGTTACCCCCAACCTGACCAGTGTCT |
| | | ACATTGCCAACCACAGGCCTCTCTTCACACACTTGGCGGTGAGGATCGGA |
| | | GGGCGCTATGTCGTGGCTGGGAAGATGAGCATCTCCCCTAACACCACCTA |
| | | CCCCTCCCTCCTGGAGGATGGTCGTGTCGAGTACAGAGTGGCCCTCACCG |
| | | AGGACCGGCTGCCCCGCCTGGAGGAGATCCGCATCTGGGGACCCCTCCAG |
| | | GAAGATGCTGACATCCAGGTTTACAGGCGGTATGGCGAGGAGTATGGCAA |
| | | CCTCACCCGCCCAGACATCACCTTCACCTACTTCCAGCCTAAGCCACGGC |
| | | AGGCCTGGGTGTGGGCCGCTGTGCGTGGGCCCTGCTCGGTGAGCTGTGGG |
| | | GCAGGGCTGCGCTGGGTAAACTACAGCTGCCTGGACCAGGCCAGGAAGGA |
| | | GTTGGTGGAGACTGTCCAGTGCCAAGGGAGCCAGCAGCCACCAGCGTGGC |
| | | CAGAGGCCTGCGTGCTCGAACCCTGCCCTCCCTACTGGGCGGTGGGAGAC |
| | | TTCGGCCCATGCAGCGCCTCCTGTGGGGGTGGCCTGCGGGAGCGGCCAGT |
| | | GCGCTGCGTGGAGGCCCAGGGCAGCCTCCTGAAGACATTGCCCCCAGCCC |
| | | GGTGCAGAGCAGGGGCCCAGCAGCCAGCTGTGGCGCTGGAAACCTGCAAC |
| | | CCCCAGCCCTGCCCTGCCAGGTGGGAGGTGTCAGAGCCCAGCTCATGCAC |
| | | ATCAGCTGGTGGAGCAGGCCTGGCCTTGGAGAACGAGACCTGTGTGCCAG |
| | | GGGCAGATGGCCTGGAGGCTCCAGTGACTGAGGGGCCTGGCTCCGTAGAT |
| | | GAGAAGCTGCCTGCCCCTGAGCCCTGTGTCGGGATGTCATGTCCTCCAGG |
| | | CTGGGGCCATCTGGATGCCACCTCTGCAGGGGAGAAGGCTCCCTCCCCAT |
| | | GGGGCAGCATCAGGACGGGGGCTCAAGCTGCACACGTGTGGACCCCTGCG |
| | | GCAGGGTCGTGCTCCGTCTCCTGCGGGCGAGGTCTGATGGAGCTCCGTTT |
| | | CCTGTGCATGGACTCTGCCCTCAGGGTGCCTGTCCAGGAAGAGCTGTGTG |
| | | GCCTGGCAAGCAAGCCTGGGAGCCGGCGGGAGGTCTGCCAGGCTGTCCCG |
| | | TGCCCTGCTCGGTGGCAGTACAAGCTGGCGGCCTGCAGCGTGAGCTGTGG |
| | | GAGAGGGGTCGTGCGGAGGATCCTGTATTGTGCCCGGGCCCATGGGGAGG |
| | | ACGATGGTGAGGAGATCCTGTTGGACACCCAGTGCCAGGGGCTGCCTCGC |
| | | CCGGAACCCCAGGAGGCCTGCAGCCTGGAGCCCTGCCCACCTAGGTGGAA |
| | | AGTCATGTCCCTTGGCCCATGTTCGGCCAGCTGTGGCCTTGGCACTGCTA |
| | | GACGCTCGGTGGCCTGTGTGCAGCTCGACCAAGGCCAGGACGTGGAGGTG |
| | | GACGAGGCGGCCTGTGCGGCGCTGGTGCGGCCCGAGGCCAGTGTCCCCTG |
| | | TCTCATTGCCGACTGCACCTACCGCTGGCATGTTGGCACCTGGATGGAGT |
| | | GCTCTGTTTCCTGTGGGGATGGCATCCAGCGCCGGCGTGACACCTGCCTC |
| | | GGACCCCAGGCCCAGGCGCCTGTGCCAGCTGATTTCTGCCAGCACTTGCC |
| | | CAAGCCGGTGACTGTGCGTGGCTGCTGGGCTGGGCCCTGTGTGGGACAGG |
| | | GTACGCCCAGCCTGGTGCCCCACGAAGAAGCCGCTGCTCCAGGACGGACC |
| | | ACAGCCACCCCTGCTGGTGCCTCCCTGGAGTGGTCCCAGGCCCGGGGCCT |
| | | GCTCTTCTCCCCGGCTCCCCAGCCTCGGCGGCTCCTGGTGGGGCCCCAGG |
| | | AAAACTCAGTGCAGTCCAGTGCCTGTGGCAGGCAGCACCTTGAGCCAACA |
| | | GGAACCATTGACATGCGAGGCCCAGGGCAGGCAGACTGTGCAGTGGCCAT |
| | | TGGGCGGCCCCTCGGGGAGGTGGTGACCCTCCGCGTCCTTGAGAGTTCTC |
| | | TCAACTGCAGTGCGGGGGACATGTTGCTGCTTTGGGGCCGGCTCACCTGG |
| | | AGGAAGATGTGCAGGAAGCTGTTGGACATGACTTTCAGCTCCAAGACCAA |
| | | CACGCTGGTGGTGAGGCAGCGCTGCGGGGGGCCAGGAGGTGGGGTGCTGC |
| | | TGCGGTATGGGAGCCAGCTTGCTCCTGAAACCTTCTACAGAGAATGTGAC |
| | | ATGCAGCTCTTTGGGCCCTGGGGTGAAATCGTGAGCCCCTCGCTGAGTCC |
| | | AGCCACGAGTAATGCAGGGGGCTGCCGGCTCTTCATTAATGTGGCTCCGC |
| | | ACGCACGGATTGCCATCCATGCCCTGGCCACCAACATGGGCGCTGGGACC |
| | | GAGGGAGCCAATGCCAGCTACATCTTGATCCGGGACACCCACAGCTTGAG |
| | | GACCACAGCGTTCCATGGGCAGCAGGTGCTCTACTGGGAGTCAGAGAGCA |
| | | GCCAGGCTGAGATGGAGTTCAGCGAGGGCTTCCTGAAGGCTCAGGCCAGC |
| | | CTGCGGGGCCAGTACTGGACCCTCCAATCATGGGTACCGGAGATGCAGGA |
| | | CCCTCAGTCCTGGAAGGGAAAGGAAGGAACCTCTAGAGGGCCCTTCGAAC |
| | | AAAAACTCATCTCAGAAGAGGATCTGAATATGCATACCGGTCATCATCAC |
| | | CATCACCAT |
| 95 | Exemplified P1182V | ATGCACCAGCGTCACCCCCGGGCAAGATGCCCTCCCCTCTGTGTGGCC |
| | variant nucleotide | GGAATCCTTGCCTGTGGCTTTCTCCTGGGCTGCTGGGGACCCTCCCATTT |
| | sequence | CCAGCAGAGCTGTCTTCAGGCTTTGGAGCCACAGGCCGTGTCTTCTTACT |
| | | TGAGCCCTGGTGCTCCCTTAAAAGGCCGCCCTCCTTCCCCTGGCTTCCAG |
| | | AGGCAGAGGCAGAGGCAGAGGCGGGCTGCAGGCGGCATCCTACACCTGGA |
| | | GCTGCTGGTGGCCGTGGGCCCCGATGTCTTCCAGGCTCACCAGGAGGACA |
| | | CAGAGCGCTATGTGCTCACCAACCTCAACATCGGGGCAGAACTGCTTCGG |
| | | GACCCGTCCCTGGGGGCTCAGTTTCGGGTGCACCTGGTGAAGATGGTCAT |
| | | TCTGACAGAGCCTGAGGGTGCTCCAAATATCACAGCCAACCTCACCTCGT |
| | | CCCTGCTGAGCGTCTGTGGGTGGAGCCAGACCATCAACCCTGAGGACGAC |
| | | ACGGATCCTGGCCATGCTGACCTGGTCCTCTATATCACTAGGTTTGACCT |
| | | GGAGTTGCCTGATGGTAACCGGCAGGTGCGGGGCGTCACCCAGCTGGGCG |
| | | GTGCCTGCTCCCCAACCTGGAGCTGCCTCATTACCGAGGACACTGGCTTC |
| | | GACCTGGGAGTCACCATTGCCCATGAGATTGGGCACAGCTTCGGCCTGGA |
| | | GCACGACGGCGCGCCCGGCAGCGGCTGCGGCCCCAGCGGACACGTGATGG |
| | | CTTCGGACGGCGCCGCGCCCCGCGCCGGCCTCGCCTGGTCCCCCTGCAGC |
| | | CGCCGGCAGCTGCTGAGCCTGCTCAGCGCAGGACGGGCGCGCTGCGTGTG |
| | | GGACCCGCCGCGGCCTCAACCCGGGTCCGCGGGGCACCCGCCGGATGCGC |
| | | AGCCTGGCCTCTACTACAGCGCCAACGAGCAGTGCCGCGTGGCCTTCGGC |
| | | CCCAAGGCTGTCGCCTGCACCTTCGCCAGGGAGCACCTGGATATGTGCCA |
| | | GGCCCTCTCCTGCCACACAGACCCGCTGGACCAAAGCAGCTGCAGCCGCC |
| | | TCCTCGTTCCTCTCCTGGATGGGACAGAATGTGGCGTGGAGAAGTGGTGC |
| | | TCCAAAGGTCGCTGCCGCTCCCTGGTGGAGCTGACCCCCATAGCAGCAGT |
| | | GCATGGGCGCTGGTCTAGCTGGGGTCCCCGAAGTCCTTGCTCCCGCTCCT |
| | | GCGGAGGAGGTGTGGTCACCAGGAGGCGGCAGTGCAACAACCCCAGACCT |
| | | GCCTTTGGGGGGCGTGCATGTGTTGGTGCTGACCTCCAGGCCGAGATGTG |
| | | CAACACTCAGGCCTGCGAGAAGACCCAGCTGGAGTTCATGTCGCAACAGT |
| | | GCGCCAGGACCGACGGCCAGCCGCTGCGCTCCTCCCCTGGGGGCGCCTCC |
| | | TTCTACCACTGGGGTGCTGCTGTACCACACAGCCAAGGGGATGCTCTGTG |
| | | CAGACACATGTGCCGGGCCATTGGCGAGAGCTTCATCATGAAGCGTGGAG |
| | | ACAGCTTCCTCGATGGGACCCGGTGTATGCCAAGTGGCCCCCGGGAGGAC |
| | | GGGACCCTGAGCCTGTGTGTGTCGGGCAGCTGCAGGACATTTGGCTGTGA |
| | | TGGTAGGATGGACTCCCAGCAGGTATGGGACAGGTGCCAGGTGTGTGGTG |
| | | GGGACAACAGCACGTGCAGCCCACGGAAGGGCTCTTTCACAGCTGGCAGA |
| | | GCGAGAGAATATGTCACGTTTCTGACAGTTACCCCCAACCTGACCAGTGT |
| | | CTACATTGCCAACCACAGGCCTCTCTTCACACACTTGGCGGTGAGGATCG |
| | | GAGGGCGCTATGTCGTGGCTGGGAAGATGAGCATCTCCCCTAACACCACC |
| | | TACCCCTCCCTCCTGGAGGATGGTCGTGTCGAGTACAGAGTGGCCCTCAC |
| | | CGAGGACCGGCTGCCCCGCCTGGAGGAGATCCGCATCTGGGGACCCCTCC |
| | | AGGAAGATGCTGACATCCAGGTTTACAGGCGGTATGGCGAGGAGTATGGC |
| | | AACCTCACCCGCCCAGACATCACCTTCACCTACTTCCAGCCTAAGCCACG |
| | | GCAGGCCTGGGTGTGGGCCGCTGTGCGTGGGCCCTGCTCGGTGAGCTGTG |
| | | GGGCAGGGCTGCGCTGGGTAAACTACAGCTGCCTGGACCAGGCCAGGAAG |
| | | GAGTTGGTGGAGACTGTCCAGTGCCAAGGGAGCCAGCAGCCACCAGCGTG |
| | | GCCAGAGGCCTGCGTGCTCGAACCCTGCCCTCCCTACTGGGCGGTGGGAG |
| | | ACTTCGGCCCATGCAGCGCCTCCTGTGGGGGTGGCCTGCGGGAGCGGCCA |
| | | GTGCGCTGCGTGGAGGCCCAGGGCAGCCTCCTGAAGACATTGCCCCCAGC |
| | | CCGGTGCAGAGCAGGGGCCCAGCAGCCAGCTGTGGCGCTGGAAACCTGCA |
| | | ACCCCCAGCCCTGCCCTGCCAGGTGGGAGGTGTCAGAGCCCAGCTCATGC |
| | | ACATCAGCTGGTGGAGCAGGCCTGGCCTTGGAGAACGAGACCTGTGTGCC |
| | | AGGGGCAGATGGCCTGGAGGCTCCAGTGACTGAGGGGCCTGGCTCCGTAG |
| | | ATGAGAAGCTGCCTGCCCCTGAGCCCTGTGTCGGGATGTCATGTCCTCCA |
| | | GGCTGGGGCCATCTGGATGCCACCTCTGCAGGGGAGAAGGCTCCCTCCCC |
| | | ATGGGGCAGCATCAGGACGGGGGCTCAAGCTGCACACGTGTGGACCCCTG |
| | | CGGCAGGGTCGTGCTCCGTCTCCTGCGGGCGAGGTCTGATGGAGCTCCGT |
| | | TTCCTGTGCATGGACTCTGCCCTCAGGGTGCCTGTCCAGGAAGAGCTGTG |
| | | TGGCCTGGCAAGCAAGCCTGGGAGCCGGGGGGAGGTCTGCCAGGCTGTCC |
| | | CGTGCCCTGCTCGGTGGCAGTACAAGCTGGCGGCCTGCAGCGTGAGCTGT |
| | | GGGAGAGGGGTCGTGCGGAGGATCCTGTATTGTGCCCGGGCCCATGGGGA |
| | | GGACGATGGTGAGGAGATCCTGTTGGACACCCAGTGCCAGGGGCTGCCTC |
| | | GCCCGGAACCCCAGGAGGCCTGCAGCCTGGAGCCCTGCCCACCTAGGTGG |
| | | AAAGTCATGTCCCTTGGCCCATGTTCGGCCAGCTGTGGCCTTGGCACTGC |
| | | TAGACGCTCGGTGGCCTGTGTGCAGCTCGACCAAGGCCAGGACGTGGAGG |
| | | TGGACGAGGCGGCCTGTGCGGCGCTGGTGCGGCCCGAGGCCAGTGTCCCC |
| | | TGTCTCATTGCCGACTGCACCTACCGCTGGCATGTTGGCACCTGGATGGA |
| | | GTGCTCTGTTTCCTGTGGGGATGGCATCCAGCGCCGGCGTGACACCTGCC |
| | | TCGGACCCCAGGCCCAGGCGCCTGTGCCAGCTGATTTCTGCCAGCACTTG |
| | | CCCAAGCCGGTGACTGTGCGTGGCTGCTGGGCTGGGCCCTGTGTGGGACA |
| | | GGGTACGCCCAGCCTGGTGCCCCACGAAGAAGCCGCTGCTCCAGGACGGA |
| | | CCACAGCCACCCCTGCTGGTGCCTCCCTGGAGTGGTCCCAGGCCCGGGGC |
| | | CTGCTCTTCTCCCCGGCTCCCCAGCCTCGGCGGCTCCTGCCCGGGGTGCA |
| | | GGAAAACTCAGTGCAGTCCAGTGCCTGTGGCAGGCAGCACCTTGAGCCAA |
| | | CAGGAACCATTGACATGCGAGGCCCAGGGCAGGCAGACTGTGCAGTGGCC |
| | | ATTGGGCGGCCCCTCGGGGAGGTGGTGACCCTCCGCGTCCTTGAGAGTTC |
| | | TCTCAACTGCAGTGCGGGGGACATGTTGCTGCTTTGGGGCCGGCTCACCT |
| | | GGAGGAAGATGTGCAGGAAGCTGTTGGACATGACTTTCAGCTCCAAGACC |
| | | AACACGCTGGTGGTGAGGCAGCGCTGCGGGCGGCCAGGAGGTGGGGTGCT |
| | | GCTGCGGTATGGGAGCCAGCTTGCTCCTGAAACCTTCTACAGAGAATGTG |
| | | ACATGCAGCTCTTTGGGCCCTGGGGTGAAATCGTGAGCCCCTCGCTGAGT |
| | | CCAGCCACGAGTAATGCAGGGGGCTGCCGGCTCTTCATTAATGTGGCTCC |
| | | GCACGCACGGATTGCCATCCATGCCCTGGCCACCAACATGGGCGCTGGGA |
| | | CCGAGGGAGCCAATGCCAGCTACATCTTGATCCGGGACACCCACAGCTTG |
| | | AGGACCACAGCGTTCCATGGGCAGCAGGTGCTCTACTGGGAGTCAGAGAG |
| | | CAGCCAGGCTGAGATGGAGTTCAGCGAGGGCTTCCTGAAGGCTCAGGCCA |
| | | GCCTGCGGGGCCAGTACTGGACCCTCCAATCATGGGTACCGGAGATGCAG |
| | | GACCCTCAGTCCTGGAAGGGAAAGGAAGGAACCTCTAGAGGGCCCTTCGA |
| | | ACAAAAACTCATCTCAGAAGAGGATCTGAATATGCATACCGGTCATCATC |
| | | ACCATCACCAT |
| 96 | Exemplified A1144K | MHQRHPRARCPPLCVAGILACGFLLGCWGPSHFQQSCLQALEPQAVSSYL |
| | variant | SPGAPLKGRPPSPGFQRQRQRQRRAAGGILHLELLVAVGPDVFQAHQEDT |
| | | ERYVLTNLNIGAELLRDPSLGAQFRVHLVKMVILTEPEGAPNITANLTSS |
| | | LLSVCGWSQTINPEDDTDPGHADLVLYITRFDLELPDGNRQVRGVTQLGG |
| | | ACSPTWSCLITEDTGFDLGVTIAHEIGHSFGLEHDGAPGSGCGPSGHVMA |
| | | SDGAAPRAGLAWSPCSRRQLLSLLSAGRARCVWDPPRPQPGSAGHPPDAQ |
| | | PGLYYSANEQCRVAFGPKAVACTFAREHLDMCQALSCHTDPLDQSSCSRL |
| | | LVPLLDGTECGVEKWCSKGRCRSLVELTPIAAVHGRWSSWGPRSPCSRSC |
| | | GGGVVTRRRQCNNPRPAFGGRACVGADLQAEMCNTQACEKTQLEFMSQQC |
| | | ARTDGQPLRSSPGGASFYHWGAAVPHSQGDALCRHMCRAIGESFIMKRGD |
| | | SFLDGTRCMPSGPREDGTLSLCVSGSCRTFGCDGRMDSQQVWDRCQVCGG |
| | | DNSTCSPRKGSFTAGRAREYVTFLTVTPNLTSVYIANHRPLFTHLAVRIG |
| | | GRYVVAGKMSISPNTTYPSLLEDGRVEYRVALTEDRLPRLEEIRIWGPLQ |
| | | EDADIQVYRRYGEEYGNLTRPDITFTYFQPKPRQAWVWAAVRGPCSVSCG |
| | | AGLRWVNYSCLDQARKELVETVQCQGSQQPPAWPEACVLEPCPPYWAVGD |
| | | FGPCSASCGGGLRERPVRCVEAQGSLLKTLPPARCRAGAQQPAVALETCN |
| | | PQPCPARWEVSEPSSCTSAGGAGLALENETCVPGADGLEAPVTEGPGSVD |
| | | EKLPAPEPCVGMSCPPGWGHLDATSAGEKAPSPWGSIRTGAQAAHVWTPA |
| | | AGSCSVSCGRGLMELRFLCMDSALRVPVQEELCGLASKPGSRREVCQAVP |
| | | CPARWQYKLAACSVSCGRGVVRRILYCARAHGEDDGEEILLDTQCQGLPR |
| | | PEPQEACSLEPCPPRWKVMSLGPCSASCGLGTARRSVACVQLDQGQDVEV |
| | | DEAACAALVRPEASVPCLIADCTYRWHVGTWMECSVSCGDGIQRRRDTCL |
| | | GPQAQAPVPADFCQHLPKPVTVRGCWAGPCVGQGTPSLVPHEEKAAPGRT |
| | | TATPAGASLEWSQARGLLFSPAPQPRRLLPGPQENSVQSSACGRQHLEPT |
| | | GTIDMRGPGQADCAVAIGRPLGEVVTLRVLESSLNCSAGDMLLLWGRLTW |
| | | RKMCRKLLDMTFSSKTNTLVVRQRCGRPGGGVLLRYGSQLAPETFYRECD |
| | | MQLFGPWGEIVSPSLSPATSNAGGCRLFINVAPHARIAIHALATNMGAGT |
| | | EGANASYILIRDTHSLRTTAFHGQQVLYWESESSQAEMEFSEGFLKAQAS |
| | | LRGQYWTLQSWVPEMQDPQSWKGKEGTSRGPFEQKLISEEDLNMHTGHHH |
| | | HHH |
| 97 | Exemplified A11441 | MHQRHPRARCPPLCVAGILACGFLLGCWGPSHFQQSCLQALEPQAVSSYL |
| | variant | SPGAPLKGRPPSPGFQRQRQRQRRAAGGILHLELLVAVGPDVFQAHQEDT |
| | | ERYVLTNLNIGAELLRDPSLGAQFRVHLVKMVILTEPEGAPNITANLTSS |
| | | LLSVCGWSQTINPEDDTDPGHADLVLYITRFDLELPDGNRQVRGVTQLGG |
| | | ACSPTWSCLITEDTGFDLGVTIAHEIGHSFGLEHDGAPGSGCGPSGHVMA |
| | | SDGAAPRAGLAWSPCSRRQLLSLLSAGRARCVWDPPRPQPGSAGHPPDAQ |
| | | PGLYYSANEQCRVAFGPKAVACTFAREHLDMCQALSCHTDPLDQSSCSRL |
| | | LVPLLDGTECGVEKWCSKGRCRSLVELTPIAAVHGRWSSWGPRSPCSRSC |
| | | GGGVVTRRRQCNNPRPAFGGRACVGADLQAEMCNTQACEKTQLEFMSQQC |
| | | ARTDGQPLRSSPGGASFYHWGAAVPHSQGDALCRHMCRAIGESFIMKRGD |
| | | SFLDGTRCMPSGPREDGTLSLCVSGSCRTFGCDGRMDSQQVWDRCQVCGG |
| | | DNSTCSPRKGSFTAGRAREYVTFLTVTPNLTSVYIANHRPLFTHLAVRIG |
| | | GRYVVAGKMSISPNTTYPSLLEDGRVEYRVALTEDRLPRLEEIRIWGPLQ |
| | | EDADIQVYRRYGEEYGNLTRPDITFTYFQPKPRQAWVWAAVRGPCSVSCG |
| | | AGLRWVNYSCLDQARKELVETVQCQGSQQPPAWPEACVLEPCPPYWAVGD |
| | | FGPCSASCGGGLRERPVRCVEAQGSLLKTLPPARCRAGAQQPAVALETCN |
| | | PQPCPARWEVSEPSSCTSAGGAGLALENETCVPGADGLEAPVTEGPGSVD |
| | | EKLPAPEPCVGMSCPPGWGHLDATSAGEKAPSPWGSIRTGAQAAHVWTPA |
| | | AGSCSVSCGRGLMELRFLCMDSALRVPVQEELCGLASKPGSRREVCQAVP |
| | | CPARWQYKLAACSVSCGRGVVRRILYCARAHGEDDGEEILLDTQCQGLPR |
| | | PEPQEACSLEPCPPRWKVMSLGPCSASCGLGTARRSVACVQLDQGQDVEV |
| | | DEAACAALVRPEASVPCLIADCTYRWHVGTWMECSVSCGDGIQRRRDTCL |
| | | GPQAQAPVPADFCQHLPKPVTVRGCWAGPCVGQGTPSLVPHEEIAAPGRT |
| | | TATPAGASLEWSQARGLLFSPAPQPRRLLPGPQENSVQSSACGRQHLEPT |
| | | GTIDMRGPGQADCAVAIGRPLGEVVTLRVLESSLNCSAGDMLLLWGRLTW |
| | | RKMCRKLLDMTFSSKTNTLVVRQRCGRPGGGVLLRYGSQLAPETFYRECD |
| | | MQLFGPWGEIVSPSLSPATSNAGGCRLFINVAPHARIAIHALATNMGAGT |
| | | EGANASYILIRDTHSLRTTAFHGQQVLYWESESSQAEMEFSEGFLKAQAS |
| | | LRGQYWTLQSWVPEMQDPQSWKGKEGTSRGPFEQKLISEEDLNMHTGHHH |
| | | HHH |
| 98 | Exemplified A1145K | MHQRHPRARCPPLCVAGILACGFLLGCWGPSHFQQSCLQALEPQAVSSYL |
| | variant | SPGAPLKGRPPSPGFQRQRQRQRRAAGGILHLELLVAVGPDVFQAHQEDT |
| | | ERYVLTNLNIGAELLRDPSLGAQFRVHLVKMVILTEPEGAPNITANLTSS |
| | | LLSVCGWSQTINPEDDTDPGHADLVLYITRFDLELPDGNRQVRGVTQLGG |
| | | ACSPTWSCLITEDTGFDLGVTIAHEIGHSFGLEHDGAPGSGCGPSGHVMA |
| | | SDGAAPRAGLAWSPCSRRQLLSLLSAGRARCVWDPPRPQPGSAGHPPDAQ |
| | | PGLYYSANEQCRVAFGPKAVACTFAREHLDMCQALSCHTDPLDQSSCSRL |
| | | LVPLLDGTECGVEKWCSKGRCRSLVELTPIAAVHGRWSSWGPRSPCSRSC |
| | | GGGVVTRRRQCNNPRPAFGGRACVGADLQAEMCNTQACEKTQLEFMSQQC |
| | | ARTDGQPLRSSPGGASFYHWGAAVPHSQGDALCRHMCRAIGESFIMKRGD |
| | | SFLDGTRCMPSGPREDGTLSLCVSGSCRTFGCDGRMDSQQVWDRCQVCGG |
| | | DNSTCSPRKGSFTAGRAREYVTFLTVTPNLTSVYIANHRPLFTHLAVRIG |
| | | GRYVVAGKMSISPNTTYPSLLEDGRVEYRVALTEDRLPRLEEIRIWGPLQ |
| | | EDADIQVYRRYGEEYGNLTRPDITFTYFQPKPRQAWVWAAVRGPCSVSCG |
| | | AGLRWVNYSCLDQARKELVE |
| | | TVQCQGSQQPPAWPEACVLEPCPPYWAVGDFGPCSASCGGGLRERPVRCV |
| | | EAQGSLLKTLPPARCRAGAQQPAVALETCNPQPCPARWEVSEPSSCTSAG |
| | | GAGLALENETCVPGADGLEAPVTEGPGSVDEKLPAPEPCVGMSCPPGWGH |
| | | LDATSAGEKAPSPWGSIRTGAQAAHVWTPAAGSCSVSCGRGLMELRFLCM |
| | | DSALRVPVQEELCGLASKPGSRREVCQAVPCPARWQYKLAACSVSCGRGV |
| | | VRRILYCARAHGEDDGEEILLDTQCQGLPRPEPQEACSLEPCPPRWKVMS |
| | | LGPCSASCGLGTARRSVACVQLDQGQDVEVDEAACAALVRPEASVPCLIA |
| | | DCTYRWHVGTWMECSVSCGDGIQRRRDTCLGPQAQAPVPADFCQHLPKPV |
| | | TVRGCWAGPCVGQGTPSLVPHEEAKAPGRTTATPAGASLEWSQARGLLFS |
| | | PAPQPRRLLPGPQENSVQSSACGRQHLEPTGTIDMRGPGQADCAVAIGRP |
| | | LGEVVTLRVLESSLNCSAGDMLLLWGRLTWRKMCRKLLDMTFSSKTNTLV |
| | | VRQRCGRPGGGVLLRYGSQLAPETFYRECDMQLFGPWGEIVSPSLSPATS |
| | | NAGGCRLFINVAPHARIAIHALATNMGAGTEGANASYILIRDTHSLRTTA |
| | | FHGQQVLYWESESSQAEMEFSEGFLKAQASLRGQYWTLQSWVPEMQDPQS |
| | | WKGKEGTSRGPFEQKLISEEDLNMHTGHHHHHH |
| 99 | Exemplified A11451 | MHQRHPRARCPPLCVAGILACGFLLGCWGPSHFQQSCLQALEPQAVSSYL |
| | variant | SPGAPLKGRPPSPGFQRQRQRQRRAAGGILHLELLVAVGPDVFQAHQEDT |
| | | ERYVLTNLNIGAELLRDPSLGAQFRVHLVKMVILTEPEGAPNITANLTSS |
| | | LLSVCGWSQTINPEDDTDPGHADLVLYITRFDLELPDGNRQVRGVTQLGG |
| | | ACSPTWSCLITEDTGFDLGVTIAHEIGHSFGLEHDGAPGSGCGPSGHVMA |
| | | SDGAAPRAGLAWSPCSRRQLLSLLSAGRARCVWDPPRPQPGSAGHPPDAQ |
| | | PGLYYSANEQCRVAFGPKAVACTFAREHLDMCQALSCHTDPLDQSSCSRL |
| | | LVPLLDGTECGVEKWCSKGRCRSLVELTPIAAVHGRWSSWGPRSPCSRSC |
| | | GGGVVTRRRQCNNPRPAFGGRACVGADLQAEMCNTQACEKTQLEFMSQQC |
| | | ARTDGQPLRSSPGGASFYHWGAAVPHSQGDALCRHMCRAIGESFIMKRGD |
| | | SFLDGTRCMPSGPREDGTLSLCVSGSCRTFGCDGRMDSQQVWDRCQVCGG |
| | | DNSTCSPRKGSFTAGRAREYVTFLTVTPNLTSVYIANHRPLFTHLAVRIG |
| | | GRYVVAGKMSISPNTTYPSLLEDGRVEYRVALTEDRLPRLEEIRIWGPLQ |
| | | EDADIQVYRRYGEEYGNLTRPDITFTYFQPKPRQAWVWAAVRGPCSVSCG |
| | | AGLRWVNYSCLDQARKELVETVQCQGSQQPPAWPEACVLEPCPPYWAVGD |
| | | FGPCSASCGGGLRERPVRCVEAQGSLLKTLPPARCRAGAQQPAVALETCN |
| | | PQPCPARWEVSEPSSCTSAGGAGLALENETCVPGADGLEAPVTEGPGSVD |
| | | EKLPAPEPCVGMSCPPGWGHLDATSAGEKAPSPWGSIRTGAQAAHVWTPA |
| | | AGSCSVSCGRGLMELRFLCMDSALRVPVQEELCGLASKPGSRREVCQAVP |
| | | CPARWQYKLAACSVSCGRGVVRRILYCARAHGEDDGEEILLDTQCQGLPR |
| | | PEPQEACSLEPCPPRWKVMSLGPCSASCGLGTARRSVACVQLDQGQDVEV |
| | | DEAACAALVRPEASVPCLIADCTYRWHVGTWMECSVSCGDGIQRRRDTCL |
| | | GPQAQAPVPADFCQHLPKPVTVRGCWAGPCVGQGTPSLVPHEEAIAPGRT |
| | | TATPAGASLEWSQARGLLFSPAPQPRRLLPGPQENSVQSSACGRQHLEPT |
| | | GTIDMRGPGQADCAVAIGRPLGEVVTLRVLESSLNCSAGDMLLLWGRLTW |
| | | RKMCRKLLDMTFSSKTNTLVVRQRCGRPGGGVLLRYGSQLAPETFYRECD |
| | | MQLFGPWGEIVSPSLSPATSNAGGCRLFINVAPHARIAIHALATNMGAGT |
| | | EGANASYILIRDTHSLRTTAFHGQQVLYWESESSQAEMEFSEGFLKAQAS |
| | | LRGQYWTLQSWVPEMQDPQSWKGKEGTSRGPFEQKLISEEDLNMHTGHHH |
| | | HHH |
| 100 | Exemplified A1146K | MHQRHPRARCPPLCVAGILACGFLLGCWGPSHFQQSCLQALEPQAVSSYL |
| | variant | SPGAPLKGRPPSPGFQRQRQRQRRAAGGILHLELLVAVGPDVFQAHQEDT |
| | | ERYVLTNLNIGAELLRDPSLGAQFRVHLVKMVILTEPEGAPNITANLTSS |
| | | LLSVCGWSQTINPEDDTDPGHADLVLYITRFDLELPDGNRQVRGVTQLGG |
| | | ACSPTWSCLITEDTGFDLGVTIAHEIGHSFGLEHDGAPGSGCGPSGHVMA |
| | | SDGAAPRAGLAWSPCSRRQLLSLLSAGRARCVWDPPRPQPGSAGHPPDAQ |
| | | PGLYYSANEQCRVAFGPKAVACTFAREHLDMCQALSCHTDPLDQSSCSRL |
| | | LVPLLDGTECGVEKWCSKGRCRSLVELTPIAAVHGRWSSWGPRSPCSRSC |
| | | GGGVVTRRRQCNNPRPAFGGRACVGADLQAEMCNTQACEKTQLEFMSQQC |
| | | ARTDGQPLRSSPGGASFYHWGAAVPHSQGDALCRHMCRAIGESFIMKRGD |
| | | SFLDGTRCMPSGPREDGTLSLCVSGSCRTFGCDGRMDSQQVWDRCQVCGG |
| | | DNSTCSPRKGSFTAGRAREYVTFLTVTPNLTSVYIANHRPLFTHLAVRIG |
| | | GRYVVAGKMSISPNTTYPSLLEDGRVEYRVALTEDRLPRLEEIRIWGPLQ |
| | | EDADIQVYRRYGEEYGNLTRPDITFTYFQPKPRQAWVWAAVRGPCSVSCG |
| | | AGLRWVNYSCLDQARKELVETVQCQGSQQPPAWPEACVLEPCPPYWAVGD |
| | | FGPCSASCGGGLRERPVRCVEAQGSLLKTLPPARCRAGAQQPAVALETCN |
| | | PQPCPARWEVSEPSSCTSAGGAGLALENETCVPGADGLEAPVTEGPGSVD |
| | | EKLPAPEPCVGMSCPPGWGHLDATSAGEKAPSPWGSIRTGAQAAHVWTPA |
| | | AGSCSVSCGRGLMELRFLCMDSALRVPVQEELCGLASKPGSRREVCQAVP |
| | | CPARWQYKLAACSVSCGRGVVRRILYCARAHGEDDGEEILLDTQCQGLPR |
| | | PEPQEACSLEPCPPRWKVMSLGPCSASCGLGTARRSVACVQLDQGQDVEV |
| | | DEAACAALVRPEASVPCLIADCTYRWHVGTWMECSVSCGDGIQRRRDTCL |
| | | GPQAQAPVPADFCQHLPKPVTVRGCWAGPCVGQGTPSLVPHEEAAKPGRT |
| | | TATPAGASLEWSQARGLLFSPAPQPRRLLPGPQENSVQSSACGRQHLEPT |
| | | GTIDMRGPGQADCAVAIGRPLGEVVTLRVLESSLNCSAGDMLLLWGRLTW |
| | | RKMCRKLLDMTFSSKTNTLVVRQRCGRPGGGVLLRYGSQLAPETFYRECD |
| | | MQLFGPWGEIVSPSLSPATSNAGGCRLFINVAPHARIAIHALATNMGAGT |
| | | EGANASYILIRDTHSLRTTAFHGQQVLYWESESSQAEMEFSEGFLKAQAS |
| | | LRGQYWTLQSWVPEMQDPQSWKGKEGTSRGPFEQKLISEEDLNMHTGHHH |
| | | HHH |
| 101 | Exemplified A11461 | MHQRHPRARCPPLCVAGILACGFLLGCWGPSHFQQSCLQALEPQAVSSYL |
| | variant | SPGAPLKGRPPSPGFQRQRQRQRRAAGGILHLELLVAVGPDVFQAHQEDT |
| | | ERYVLTNLNIGAELLRDPSLGAQFRVHLVKMVILTEPEGAPNITANLTSS |
| | | LLSVCGWSQTINPEDDTDPGHADLVLYITRFDLELPDGNRQVRGVTQLGG |
| | | ACSPTWSCLITEDTGFDLGVTIAHEIGHSFGLEHDGAPGSGCGPSGHVMA |
| | | SDGAAPRAGLAWSPCSRRQLLSLLSAGRARCVWDPPRPQPGSAGHPPDAQ |
| | | PGLYYSANEQCRVAFGPKAVACTFAREHLDMCQALSCHTDPLDQSSCSRL |
| | | LVPLLDGTECGVEKWCSKGRCRSLVELTPIAAVHGRWSSWGPRSPCSRSC |
| | | GGGVVTRRRQCNNPRPAFGGRACVGADLQAEMCNTQACEKTQLEFMSQQC |
| | | ARTDGQPLRSSPGGASFYHWGAAVPHSQGDALCRHMCRAIGESFIMKRGD |
| | | SFLDGTRCMPSGPREDGTLSLCVSGSCRTFGCDGRMDSQQVWDRCQVCGG |
| | | DNSTCSPRKGSFTAGRAREYVTFLTVTPNLTSVYIANHRPLFTHLAVRIG |
| | | GRYVVAGKMSISPNTTYPSLLEDGRVEYRVALTEDRLPRLEEIRIWGPLQ |
| | | EDADIQVYRRYGEEYGNLTRPDITFTYFQPKPRQAWVWAAVRGPCSVSCG |
| | | AGLRWVNYSCLDQARKELVETVQCQGSQQPPAWPEACVLEPCPPYWAVGD |
| | | FGPCSASCGGGLRERPVRCVEAQGSLLKTLPPARCRAGAQQPAVALETCN |
| | | PQPCPARWEVSEPSSCTSAGGAGLALENETCVPGADGLEAPVTEGPGSVD |
| | | EKLPAPEPCVGMSCPPGWGHLDATSAGEKAPSPWGSIRTGAQAAHVWTPA |
| | | AGSCSVSCGRGLMELRFLCMDSALRVPVQEELCGLASKPGSRREVCQAVP |
| | | CPARWQYKLAACSVSCGRGVVRRILYCARAHGEDDGEEILLDTQCQGLPR |
| | | PEPQEACSLEPCPPRWKVMSLGPCSASCGLGTARRSVACVQLDQGQDVEV |
| | | DEAACAALVRPEASVPCLIADCTYRWHVGTWMECSVSCGDGIQRRRDTCL |
| | | GPQAQAPVPADFCQHLPKPVTVRGCWAGPCVGQGTPSLVPHEEAAIPGRT |
| | | TATPAGASLEWSQARGLLFSPAPQPRRLLPGPQENSVQSSACGRQHLEPT |
| | | GTIDMRGPGQADCAVAIGRPLGEVVTLRVLESSLNCSAGDMLLLWGRLTW |
| | | RKMCRKLLDMTFSSKTNTLVVRQRCGRPGGGVLLRYGSQLAPETFYRECD |
| | | MQLFGPWGEIVSPSLSPATSNAGGCRLFINVAPHARIAIHALATNMGAGT |
| | | EGANASYILIRDTHSLRTTAFHGQQVLYWESESSQAEMEFSEGFLKAQAS |
| | | LRGQYWTLQSWVPEMQDPQSWKGKEGTSRGPFEQKLISEEDLNMHTGHHH |
| | | HHH |
| 102 | Exemplified P1147K | MHQRHPRARCPPLCVAGILACGFLLGCWGPSHFQQSCLQALEPQAVSSYL |
| | variant | SPGAPLKGRPPSPGFQRQRQRQRRAAGGILHLELLVAVGPDVFQAHQEDT |
| | | ERYVLTNLNIGAELLRDPSLGAQFRVHLVKMVILTEPEGAPNITANLTSS |
| | | LLSVCGWSQTINPEDDTDPGHADLVLYITRFDLELPDGNRQVRGVTQLGG |
| | | ACSPTWSCLITEDTGFDLGVTIAHEIGHSFGLEHDGAPGSGCGPSGHVMA |
| | | SDGAAPRAGLAWSPCSRRQLLSLLSAGRARCVWDPPRPQPGSAGHPPDAQ |
| | | PGLYYSANEQCRVAFGPKAVACTFAREHLDMCQALSCHTDPLDQSSCSRL |
| | | LVPLLDGTECGVEKWCSKGRCRSLVELTPIAAVHGRWSSWGPRSPCSRSC |
| | | GGGVVTRRRQCNNPRPAFGGRACVGADLQAEMCNTQACEKTQLEFMSQQC |
| | | ARTDGQPLRSSPGGASFYHWGAAVPHSQGDALCRHMCRAIGESFIMKRGD |
| | | SFLDGTRCMPSGPREDGTLSLCVSGSCRTFGCDGRMDSQQVWDRCQVCGG |
| | | DNSTCSPRKGSFTAGRAREYVTFLTVTPNLTSVYIANHRPLFTHLAVRIG |
| | | GRYVVAGKMSISPNTTYPSLLEDGRVEYRVALTEDRLPRLEEIRIWGPLQ |
| | | EDADIQVYRRYGEEYGNLTRPDITFTYFQPKPRQAWVWAAVRGPCSVSCG |
| | | AGLRWVNYSCLDQARKELVETVQCQGSQQPPAWPEACVLEPCPPYWAVGD |
| | | FGPCSASCGGGLRERPVRCVEAQGSLLKTLPPARCRAGAQQPAVALETCN |
| | | PQPCPARWEVSEPSSCTSAGGAGLALENETCVPGADGLEAPVTEGPGSVD |
| | | EKLPAPEPCVGMSCPPGWGHLDATSAGEKAPSPWGSIRTGAQAAHVWTPA |
| | | AGSCSVSCGRGLMELRFLCMDSALRVPVQEELCGLASKPGSRREVCQAVP |
| | | CPARWQYKLAACSVSCGRGVVRRILYCARAHGEDDGEEILLDTQCQGLPR |
| | | PEPQEACSLEPCPPRWKVMSLGPCSASCGLGTARRSVACVQLDQGQDVEV |
| | | DEAACAALVRPEASVPCLIADCTYRWHVGTWMECSVSCGDGIQRRRDTCL |
| | | GPQAQAPVPADFCQHLPKPVTVRGCWAGPCVGQGTPSLVPHEEAAAKGRT |
| | | TATPAGASLEWSQARGLLFSPAPQPRRLLPGPQENSVQSSACGRQHLEPT |
| | | GTIDMRGPGQADCAVAIGRPLGEVVTLRVLESSLNCSAGDMLLLWGRLTW |
| | | RKMCRKLLDMTFSSKTNTLVVRQRCGRPGGGVLLRYGSQLAPETFYRECD |
| | | MQLFGPWGEIVSPSLSPATSNAGGCRLFINVAPHARIAIHALATNMGAGT |
| | | EGANASYILIRDTHSLRTTAFHGQQVLYWESESSQAEMEFSEGFLKAQAS |
| | | LRGQYWTLQSWVPEMQDPQSWKGKEGTSRGPFEQKLISEEDLNMHTGHHH |
| | | HHH |
| 103 | Exemplified P11471 | MHQRHPRARCPPLCVAGILACGFLLGCWGPSHFQQSCLQALEPQAVSSYL |
| | variant | SPGAPLKGRPPSPGFQRQRQRQRRAAGGILHLELLVAVGPDVFQAHQEDT |
| | | ERYVLTNLNIGAELLRDPSLGAQFRVHLVKMVILTEPEGAPNITANLTSS |
| | | LLSVCGWSQTINPEDDTDPGHADLVLYITRFDLELPDGNRQVRGVTQLGG |
| | | ACSPTWSCLITEDTGFDLGVTIAHEIGHSFGLEHDGAPGSGCGPSGHVMA |
| | | SDGAAPRAGLAWSPCSRRQLLSLLSAGRARCVWDPPRPQPGSAGHPPDAQ |
| | | PGLYYSANEQCRVAFGPKAVACTFAREHLDMCQALSCHTDPLDQSSCSRL |
| | | LVPLLDGTECGVEKWCSKGRCRSLVELTPIAAVHGRWSSWGPRSPCSRSC |
| | | GGGVVTRRRQCNNPRPAFGGRACVGADLQAEMCNTQACEKTQLEFMSQQC |
| | | ARTDGQPLRSSPGGASFYHWGAAVPHSQGDALCRHMCRAIGESFIMKRGD |
| | | SFLDGTRCMPSGPREDGTLSLCVSGSCRTFGCDGRMDSQQVWDRCQVCGG |
| | | DNSTCSPRKGSFTAGRAREYVTFLTVTPNLTSVYIANHRPLFTHLAVRIG |
| | | GRYVVAGKMSISPNTTYPSLLEDGRVEYRVALTEDRLPRLEEIRIWGPLQ |
| | | EDADIQVYRRYGEEYGNLTRPDITFTYFQPKPRQAWVWAAVRGPCSVSCG |
| | | AGLRWVNYSCLDQARKELVETVQCQGSQQPPAWPEACVLEPCPPYWAVGD |
| | | FGPCSASCGGGLRERPVRCVEAQGSLLKTLPPARCRAGAQQPAVALETCN |
| | | PQPCPARWEVSEPSSCTSAGGAGLALENETCVPGADGLEAPVTEGPGSVD |
| | | EKLPAPEPCVGMSCPPGWGHLDATSAGEKAPSPWGSIRTGAQAAHVWTPA |
| | | AGSCSVSCGRGLMELRFLCMDSALRVPVQEELCGLASKPGSRREVCQAVP |
| | | CPARWQYKLAACSVSCGRGVVRRILYCARAHGEDDGEEILLDTQCQGLPR |
| | | PEPQEACSLEPCPPRWKVMSLGPCSASCGLGTARRSVACVQLDQGQDVEV |
| | | DEAACAALVRPEASVPCLIADCTYRWHVGTWMECSVSCGDGIQRRRDTCL |
| | | GPQAQAPVPADFCQHLPKPVTVRGCWAGPCVGQGTPSLVPHEEAAAIGRT |
| | | TATPAGASLEWSQARGLLFSPAPQPRRLLPGPQENSVQSSACGRQHLEPT |
| | | GTIDMRGPGQADCAVAIGRPLGEVVTLRVLESSLNCSAGDMLLLWGRLTW |
| | | RKMCRKLLDMTFSSKTNTLVVRQRCGRPGGGVLLRYGSQLAPETFYRECD |
| | | MQLFGPWGEIVSPSLSPATSNAGGCRLFINVAPHARIAIHALATNMGAGT |
| | | EGANASYILIRDTHSLRTTAFHGQQVLYWESESSQAEMEFSEGFLKAQAS |
| | | LRGQYWTLQSWVPEMQDPQSWKGKEGTSRGPFEQKLISEEDLNMHTGHHH |
| | | HHH |
| 104 | Exemplified P1154K | MHQRHPRARCPPLCVAGILACGFLLGCWGPSHFQQSCLQALEPQAVSSYL |
| | variant | SPGAPLKGRPPSPGFQRQRQRQRRAAGGILHLELLVAVGPDVFQAHQEDT |
| | | ERYVLTNLNIGAELLRDPSLGAQFRVHLVKMVILTEPEGAPNITANLTSS |
| | | LLSVCGWSQTINPEDDTDPGHADLVLYITRFDLELPDGNRQVRGVTQLGG |
| | | ACSPTWSCLITEDTGFDLGVTIAHEIGHSFGLEHDGAPGSGCGPSGHVMA |
| | | SDGAAPRAGLAWSPCSRRQLLSLLSAGRARCVWDPPRPQPGSAGHPPDAQ |
| | | PGLYYSANEQCRVAFGPKAVACTFAREHLDMCQALSCHTDPLDQSSCSRL |
| | | LVPLLDGTECGVEKWCSKGRCRSLVELTPIAAVHGRWSSWGPRSPCSRSC |
| | | GGGVVTRRRQCNNPRPAFGGRACVGADLQAEMCNTQACEKTQLEFMSQQC |
| | | ARTDGQPLRSSPGGASFYHWGAAVPHSQGDALCRHMCRAIGESFIMKRGD |
| | | SFLDGTRCMPSGPREDGTLSLCVSGSCRTFGCDGRMDSQQVWDRCQVCGG |
| | | DNSTCSPRKGSFTAGRAREYVTFLTVTPNLTSVYIANHRPLFTHLAVRIG |
| | | GRYVVAGKMSISPNTTYPSLLEDGRVEYRVALTEDRLPRLEEIRIWGPLQ |
| | | EDADIQVYRRYGEEYGNLTRPDITFTYFQPKPRQAWVWAAVRGPCSVSCG |
| | | AGLRWVNYSCLDQARKELVETVQCQGSQQPPAWPEACVLEPCPPYWAVGD |
| | | FGPCSASCGGGLRERPVRCVEAQGSLLKTLPPARCRAGAQQPAVALETCN |
| | | PQPCPARWEVSEPSSCTSAGGAGLALENETCVPGADGLEAPVTEGPGSVD |
| | | EKLPAPEPCVGMSCPPGWGHLDATSAGEKAPSPWGSIRTGAQAAHVWTPA |
| | | AGSCSVSCGRGLMELRFLCMDSALRVPVQEELCGLASKPGSRREVCQAVP |
| | | CPARWQYKLAACSVSCGRGVVRRILYCARAHGEDDGEEILLDTQCQGLPR |
| | | PEPQEACSLEPCPPRWKVMSLGPCSASGGLGTARRSVACVQLDQGQDVEV |
| | | DEAACAALVRPEASVPCLIADCTYRWHVGTWMECSVSCGDGIQRRRDTCL |
| | | GPQAQAPVPADFCQHLPKPVTVRGCWAGPCVGQGTPSLVPHEEAAAPGRT |
| | | TATKAGASLEWSQARGLLFSPAPQPRRLLPGPQENSVQSSACGRQHLEPT |
| | | GTIDMRGPGQADCAVAIGRPLGEVVTLRVLESSLNCSAGDMLLLWGRLTW |
| | | RKMCRKLLDMTFSSKTNTLVVRQRCGRPGGGVLLRYGSQLAPETFYRECD |
| | | MQLFGPWGEIVSPSLSPATSNAGGCRLFINVAPHARIAIHALATNMGAGT |
| | | EGANASYILIRDTHSLRTTAFHGQQVLYWESESSQAEMEFSEGFLKAQAS |
| | | LRGQYWTLQSWVPEMQDPQSWKGKEGTSRGPFEQKLISEEDLNMHTGHHH |
| | | HHH |
| 105 | Exemplified P11541 | MHQRHPRARCPPLCVAGILACGFLLGCWGPSHFQQSCLQALEPQAVSSYL |
| | variant | SPGAPLKGRPPSPGFQRQRQRQRRAAGGILHLELLVAVGPDVFQAHQEDT |
| | | ERYVLTNLNIGAELLRDPSLGAQFRVHLVKMVILTEPEGAPNITANLTSS |
| | | LLSVCGWSQTINPEDDTDPGHADLVLYITRFDLELPDGNRQVRGVTQLGG |
| | | ACSPTWSCLITEDTGFDLGVTIAHEIGHSFGLEHDGAPGSGCGPSGHVMA |
| | | SDGAAPRAGLAWSPCSRRQLLSLLSAGRARCVWDPPRPQPGSAGHPPDAQ |
| | | PGLYYSANEQCRVAFGPKAVACTFAREHLDMCQALSCHTDPLDQSSCSRL |
| | | LVPLLDGTECGVEKWCSKGRCRSLVELTPIAAVHGRWSSWGPRSPCSRSC |
| | | GGGVVTRRRQCNNPRPAFGGRACVGADLQAEMCNTQACEKTQLEFMSQQC |
| | | ARTDGQPLRSSPGGASFYHWGAAVPHSQGDALCRHMCRAIGESFIMKRGD |
| | | SFLDGTRCMPSGPREDGTLSLCVSGSCRTFGCDGRMDSQQVWDRCQVCGG |
| | | DNSTCSPRKGSFTAGRAREYVTFLTVTPNLTSVYIANHRPLFTHLAVRIG |
| | | GRYVVAGKMSISPNTTYPSLLEDGRVEYRVALTEDRLPRLEEIRIWGPLQ |
| | | EDADIQVYRRYGEEYGNLTRPDITFTYFQPKPRQAWVWAAVRGPCSVSCG |
| | | AGLRWVNYSCLDQARKELVETVQCQGSQQPPAWPEACVLEPCPPYWAVGD |
| | | FGPCSASCGGGLRERPVRCVEAQGSLLKTLPPARCRAGAQQPAVALETCN |
| | | PQPCPARWEVSEPSSCTSAGGAGLALENETCVPGADGLEAPVTEGPGSVD |
| | | EKLPAPEPCVGMSCPPGWGHLDATSAGEKAPSPWGSIRTGAQAAHVWTPA |
| | | AGSCSVSCGRGLMELRFLCMDSALRVPVQEELCGLASKPGSRREVCQAVP |
| | | CPARWQYKLAACSVSCGRGVVRRILYCARAHGEDDGEEILLDTQCQGLPR |
| | | PEPQEACSLEPCPPRWKVMSLGPCSASCGLGTARRSVACVQLDQGQDVEV |
| | | DEAACAALVRPEASVPCLIADCTYRWHVGTWMECSVSCGDGIQRRRDTCL |
| | | GPQAQAPVPADFCQHLPKPVTVRGCWAGPCVGQGTPSLVPHEEAAAPGRT |
| | | TATIAGASLEWSQARGLLFSPAPQPRRLLPGPQENSVQSSACGRQHLEPT |
| | | GTIDMRGPGQADCAVAIGRPLGEVVTLRVLESSLNCSAGDMLLLWGRLTW |
| | | RKMCRKLLDMTFSSKTNTLVVRQRCGRPGGGVLLRYGSQLAPETFYRECD |
| | | MQLFGPWGEIVSPSLSPATSNAGGCRLFINVAPHARIAIHALATNMGAGT |
| | | EGANASYILIRDTHSLRTTAFHGQQVLYWESESSQAEMEFSEGFLKAQAS |
| | | LRGQYWTLQSWVPEMQDPQSWKGKEGTSRGPFEQKLISEEDLNMHTGHHH |
| | | HHH |
| 106 | Exemplified P1171K | MHQRHPRARCPPLCVAGILACGFLLGCWGPSHFQQSCLQALEPQAVSSYL |
| | variant | SPGAPLKGRPPSPGFQRQRQRQRRAAGGILHLELLVAVGPDVFQAHQEDT |
| | | ERYVLTNLNIGAELLRDPSLGAQFRVHLVKMVILTEPEGAPNITANLTSS |
| | | LLSVCGWSQTINPEDDTDPGHADLVLYITRFDLELPDGNRQVRGVTQLGG |
| | | ACSPTWSCLITEDTGFDLGVTIAHEIGHSFGLEHDGAPGSGCGPSGHVMA |
| | | SDGAAPRAGLAWSPCSRRQLLSLLSAGRARCVWDPPRPQPGSAGHPPDAQ |
| | | PGLYYSANEQCRVAFGPKAVACTFAREHLDMCQALSCHTDPLDQSSCSRL |
| | | LVPLLDGTECGVEKWCSKGRCRSLVELTPIAAVHGRWSSWGPRSPCSRSC |
| | | GGGVVTRRRQCNNPRPAFGGRACVGADLQAEMCNTQACEKTQLEFMSQQC |
| | | ARTDGQPLRSSPGGASFYHWGAAVPHSQGDALCRHMCRAIGESFIMKRGD |
| | | SFLDGTRCMPSGPREDGTLSLCVSGSCRTFGCDGRMDSQQVWDRCQVCGG |
| | | DNSTCSPRKGSFTAGRAREYVTFLTVTPNLTSVYIANHRPLFTHLAVRIG |
| | | GRYVVAGKMSISPNTTYPSLLEDGRVEYRVALTEDRLPRLEEIRIWGPLQ |
| | | EDADIQVYRRYGEEYGNLTRPDITFTYFQPKPRQAWVWAAVRGPCSVSCG |
| | | AGLRWVNYSCLDQARKELVETVQCQGSQQPPAWPEACVLEPCPPYWAVGD |
| | | FGPCSASCGGGLRERPVRCVEAQGSLLKTLPPARCRAGAQQPAVALETCN |
| | | PQPCPARWEVSEPSSCTSAGGAGLALENETCVPGADGLEAPVTEGPGSVD |
| | | EKLPAPEPCVGMSCPPGWGHLDATSAGEKAPSPWGSIRTGAQAAHVWTPA |
| | | AGSCSVSCGRGLMELRFLCMDSALRVPVQEELCGLASKPGSRREVCQAVP |
| | | CPARWQYKLAACSVSCGRGVVRRILYCARAHGEDDGEEILLDTQCQGLPR |
| | | PEPQEACSLEPCPPRWKVMSLGPCSASCGLGTARRSVACVQLDQGQDVEV |
| | | DEAACAALVRPEASVPCLIADCTYRWHVGTWMECSVSCGDGIQRRRDTCL |
| | | GPQAQAPVPADFCQHLPKPVTVRGCWAGPCVGQGTPSLVPHEEAAAPGRT |
| | | TATPAGASLEWSQARGLLFSKAPQPRRLLPGPQENSVQSSACGRQHLEPT |
| | | GTIDMRGPGQADCAVAIGRPLGEVVTLRVLESSLNCSAGDMLLLWGRLTW |
| | | RKMCRKLLDMTFSSKTNTLVVRQRCGRPGGGVLLRYGSQLAPETFYRECD |
| | | MQLFGPWGEIVSPSLSPATSNAGGCRLFINVAPHARIAIHALATNMGAGT |
| | | EGANASYILIRDTHSLRTTAFHGQQVLYWESESSQAEMEFSEGFLKAQAS |
| | | LRGQYWTLQSWVPEMQDPQSWKGKEGTSRGPFEQKLISEEDLNMHTGHHH |
| | | HHH |
| 107 | Exemplified P11711 | MHQRHPRARCPPLCVAGILACGFLLGCWGPSHFQQSCLQALEPQAVSSYL |
| | variant | SPGAPLKGRPPSPGFQRQRQRQRRAAGGILHLELLVAVGPDVFQAHQEDT |
| | | ERYVLTNLNIGAELLRDPSLGAQFRVHLVKMVILTEPEGAPNITANLTSS |
| | | LLSVCGWSQTINPEDDTDPGHADLVLYITRFDLELPDGNRQVRGVTQLGG |
| | | ACSPTWSCLITEDTGFDLGVTIAHEIGHSFGLEHDGAPGSGCGPSGHVMA |
| | | SDGAAPRAGLAWSPCSRRQLLSLLSAGRARCVWDPPRPQPGSAGHPPDAQ |
| | | PGLYYSANEQCRVAFGPKAVACTFAREHLDMCQALSCHTDPLDQSSCSRL |
| | | LVPLLDGTECGVEKWCSKGRCRSLVELTPIAAVHGRWSSWGPRSPCSRSC |
| | | GGGVVTRRRQCNNPRPAFGGRACVGADLQAEMCNTQACEKTQLEFMSQQC |
| | | ARTDGQPLRSSPGGASFYHWGAAVPHSQGDALCRHMCRAIGESFIMKRGD |
| | | SFLDGTRCMPSGPREDGTLSLCVSGSCRTFGCDGRMDSQQVWDRCQVCGG |
| | | DNSTCSPRKGSFTAGRAREYVTFLTVTPNLTSVYIANHRPLFTHLAVRIG |
| | | GRYVVAGKMSISPNTTYPSLLEDGRVEYRVALTEDRLPRLEEIRIWGPLQ |
| | | EDADIQVYRRYGEEYGNLTRPDITFTYFQPKPRQAWVWAAVRGPCSVSCG |
| | | AGLRWVNYSCLDQARKELVETVQCQGSQQPPAWPEACVLEPCPPYWAVGD |
| | | FGPCSASCGGGLRERPVRCVEAQGSLLKTLPPARCRAGAQQPAVALETCN |
| | | PQPCPARWEVSEPSSCTSAGGAGLALENETCVPGADGLEAPVTEGPGSVD |
| | | EKLPAPEPCVGMSCPPGWGHLDATSAGEKAPSPWGSIRTGAQAAHVWTPA |
| | | AGSCSVSCGRGLMELRFLCMDSALRVPVQEELCGLASKPGSRREVCQAVP |
| | | CPARWQYKLAACSVSCGRGVVRRILYCARAHGEDDGEEILLDTQCQGLPR |
| | | PEPQEACSLEPCPPRWKVMSLGPCSASCGLGTARRSVACVQLDQGQDVEV |
| | | DEAACAALVRPEASVPCLIADCTYRWHVGTWMECSVSCGDGIQRRRDTCL |
| | | GPQAQAPVPADFCQHLPKPVTVRGCWAGPCVGQGTPSLVPHEEAAAPGRT |
| | | TATPAGASLEWSQARGLLFSIAPQPRRLLPGPQENSVQSSACGRQHLEPT |
| | | GTIDMRGPGQADCAVAIGRPLGEVVTLRVLESSLNCSAGDMLLLWGRLTW |
| | | RKMCRKLLDMTFSSKTNTLVVRQRCGRPGGGVLLRYGSQLAPETFYRECD |
| | | MQLFGPWGEIVSPSLSPATSNAGGCRLFINVAPHARIAIHALATNMGAGT |
| | | EGANASYILIRDTHSLRTTAFHGQQVLYWESESSQAEMEFSEGFLKAQAS |
| | | LRGQYWTLQSWVPEMQDPQSWKGKEGTSRGPFEQKLISEEDLNMHTGHHH |
| | | HHH |
| 108 | Exemplified P1173K | MHQRHPRARCPPLCVAGILACGFLLGCWGPSHFQQSCLQALEPQAVSSYL |
| | variant | SPGAPLKGRPPSPGFQRQRQRQRRAAGGILHLELLVAVGPDVFQAHQEDT |
| | | ERYVLTNLNIGAELLRDPSLGAQFRVHLVKMVILTEPEGAPNITANLTSS |
| | | LLSVCGWSQTINPEDDTDPGHADLVLYITRFDLELPDGNRQVRGVTQLGG |
| | | ACSPTWSCLITEDTGFDLGVTIAHEIGHSFGLEHDGAPGSGCGPSGHVMA |
| | | SDGAAPRAGLAWSPCSRRQLLSLLSAGRARCVWDPPRPQPGSAGHPPDAQ |
| | | PGLYYSANEQCRVAFGPKAVACTFAREHLDMCQALSCHTDPLDQSSCSRL |
| | | LVPLLDGTECGVEKWCSKGRCRSLVELTPIAAVHGRWSSWGPRSPCSRSC |
| | | GGGVVTRRRQCNNPRPAFGGRACVGADLQAEMCNTQACEKTQLEFMSQQC |
| | | ARTDGQPLRSSPGGASFYHWGAAVPHSQGDALCRHMCRAIGESFIMKRGD |
| | | SFLDGTRCMPSGPREDGTLSLCVSGSCRTFGCDGRMDSQQVWDRCQVCGG |
| | | DNSTCSPRKGSFTAGRAREYVTFLTVTPNLTSVYIANHRPLFTHLAVRIG |
| | | GRYVVAGKMSISPNTTYPSLLEDGRVEYRVALTEDRLPRLEEIRIWGPLQ |
| | | EDADIQVYRRYGEEYGNLTRPDITFTYFQPKPRQAWVWAAVRGPCSVSCG |
| | | AGLRWVNYSCLDQARKELVETVQCQGSQQPPAWPEACVLEPCPPYWAVGD |
| | | FGPCSASCGGGLRERPVRCVEAQGSLLKTLPPARCRAGAQQPAVALETCN |
| | | PQPCPARWEVSEPSSCTSAGGAGLALENETCVPGADGLEAPVTEGPGSVD |
| | | EKLPAPEPCVGMSCPPGWGHLDATSAGEKAPSPWGSIRTGAQAAHVWTPA |
| | | AGSCSVSCGRGLMELRFLCMDSALRVPVQEELCGLASKPGSRREVCQAVP |
| | | CPARWQYKLAACSVSCGRGVVRRILYCARAHGEDDGEEILLDTQCQGLPR |
| | | PEPQEACSLEPCPPRWKVMSLGPCSASCGLGTARRSVACVQLDQGQDVEV |
| | | DEAACAALVRPEASVPCLIADCTYRWHVGTWMECSVSCGDGIQRRRDTCL |
| | | GPQAQAPVPADFCQHLPKPVTVRGCWAGPCVGQGTPSLVPHEEAAAPGRT |
| | | TATPAGASLEWSQARGLLFSPAKQPRRLLPGPQENSVQSSACGRQHLEPT |
| | | GTIDMRGPGQADCAVAIGRPLGEVVTLRVLESSLNCSAGDMLLLWGRLTW |
| | | RKMCRKLLDMTFSSKTNTLVVRQRCGRPGGGVLLRYGSQLAPETFYRECD |
| | | MQLFGPWGEIVSPSLSPATSNAGGCRLFINVAPHARIAIHALATNMGAGT |
| | | EGANASYILIRDTHSLRTTAFHGQQVLYWESESSQAEMEFSEGFLKAQAS |
| | | LRGQYWTLQSWVPEMQDPQSWKGKEGTSRGPFEQKLISEEDLNMHTGHHH |
| | | HHH |
| 109 | Exemplified P11731 | MHQRHPRARCPPLCVAGILACGFLLGCWGPSHFQQSCLQALEPQAVSSYL |
| | variant | SPGAPLKGRPPSPGFQRQRQRQRRAAGGILHLELLVAVGPDVFQAHQEDT |
| | | ERYVLTNLNIGAELLRDPSLGAQFRVHLVKMVILTEPEGAPNITANLTSS |
| | | LLSVCGWSQTINPEDDTDPGHADLVLYITRFDLELPDGNRQVRGVTQLGG |
| | | ACSPTWSCLITEDTGFDLGVTIAHEIGHSFGLEHDGAPGSGCGPSGHVMA |
| | | SDGAAPRAGLAWSPCSRRQLLSLLSAGRARCVWDPPRPQPGSAGHPPDAQ |
| | | PGLYYSANEQCRVAFGPKAVACTFAREHLDMCQALSCHTDPLDQSSCSRL |
| | | LVPLLDGTECGVEKWCSKGRCRSLVELTPIAAVHGRWSSWGPRSPCSRSC |
| | | GGGVVTRRRQCNNPRPAFGGRACVGADLQAEMCNTQACEKTQLEFMSQQC |
| | | ARTDGQPLRSSPGGASFYHWGAAVPHSQGDALCRHMCRAIGESFIMKRGD |
| | | SFLDGTRCMPSGPREDGTLSLCVSGSCRTFGCDGRMDSQQVWDRCQVCGG |
| | | DNSTCSPRKGSFTAGRAREYVTFLTVTPNLTSVYIANHRPLFTHLAVRIG |
| | | GRYVVAGKMSISPNTTYPSLLEDGRVEYRVALTEDRLPRLEEIRIWGPLQ |
| | | EDADIQVYRRYGEEYGNLTRPDITFTYFQPKPRQAWVWAAVRGPCSVSCG |
| | | AGLRWVNYSCLDQARKELVETVQCQGSQQPPAWPEACVLEPCPPYWAVGD |
| | | FGPCSASCGGGLRERPVRCVEAQGSLLKTLPPARCRAGAQQPAVALETCN |
| | | PQPCPARWEVSEPSSCTSAGGAGLALENETCVPGADGLEAPVTEGPGSVD |
| | | EKLPAPEPCVGMSCPPGWGHLDATSAGEKAPSPWGSIRTGAQAAHVWTPA |
| | | AGSCSVSCGRGLMELRFLCMDSALRVPVQEELCGLASKPGSRREVCQAVP |
| | | CPARWQYKLAACSVSCGRGVVRRILYCARAHGEDDGEEILLDTQCQGLPR |
| | | PEPQEACSLEPCPPRWKVMSLGPCSASCGLGTARRSVACVQLDQGQDVEV |
| | | DEAACAALVRPEASVPCLIADCTYRWHVGTWMECSVSCGDGIQRRRDTCL |
| | | GPQAQAPVPADFCQHLPKPVTVRGCWAGPCVGQGTPSLVPHEEAAAPGRT |
| | | TATPAGASLEWSQARGLLFSPAIQPRRLLPGPQENSVQSSACGRQHLEPT |
| | | GTIDMRGPGQADCAVAIGRPLGEVVTLRVLESSLNCSAGDMLLLWGRLTW |
| | | RKMCRKLLDMTFSSKTNTLVVRQRCGRPGGGVLLRYGSQLAPETFYRECD |
| | | MQLFGPWGEIVSPSLSPATSNAGGCRLFINVAPHARIAIHALATNMGAGT |
| | | EGANASYILIRDTHSLRTTAFHGQQVLYWESESSQAEMEFSEGFLKAQAS |
| | | LRGQYWTLQSWVPEMQDPQSWKGKEGTSRGPFEQKLISEEDLNMHTGHHH |
| | | HHH |
| 110 | Exemplified P1175K | MHQRHPRARCPPLCVAGILACGFLLGCWGPSHFQQSCLQALEPQAVSSYL |
| | variant | SPGAPLKGRPPSPGFQRQRQRQRRAAGGILHLELLVAVGPDVFQAHQEDT |
| | | ERYVLTNLNIGAELLRDPSLGAQFRVHLVKMVILTEPEGAPNITANLTSS |
| | | LLSVCGWSQTINPEDDTDPGHADLVLYITRFDLELPDGNRQVRGVTQLGG |
| | | ACSPTWSCLITEDTGFDLGVTIAHEIGHSFGLEHDGAPGSGCGPSGHVMA |
| | | SDGAAPRAGLAWSPCSRRQLLSLLSAGRARCVWDPPRPQPGSAGHPPDAQ |
| | | PGLYYSANEQCRVAFGPKAVACTFAREHLDMCQALSCHTDPLDQSSCSRL |
| | | LVPLLDGTECGVEKWCSKGRCRSLVELTPIAAVHGRWSSWGPRSPCSRSC |
| | | GGGVVTRRRQCNNPRPAFGGRACVGADLQAEMCNTQACEKTQLEFMSQQC |
| | | ARTDGQPLRSSPGGASFYHWGAAVPHSQGDALCRHMCRAIGESFIMKRGD |
| | | SFLDGTRCMPSGPREDGTLSLCVSGSCRTFGCDGRMDSQQVWDRCQVCGG |
| | | DNSTCSPRKGSFTAGRAREYVTFLTVTPNLTSVYIANHRPLFTHLAVRIG |
| | | GRYVVAGKMSISPNTTYPSLLEDGRVEYRVALTEDRLPRLEEIRIWGPLQ |
| | | EDADIQVYRRYGEEYGNLTRPDITFTYFQPKPRQAWVWAAVRGPCSVSCG |
| | | AGLRWVNYSCLDQARKELVETVQCQGSQQPPAWPEACVLEPCPPYWAVGD |
| | | FGPCSASCGGGLRERPVRCVEAQGSLLKTLPPARCRAGAQQPAVALETCN |
| | | PQPCPARWEVSEPSSCTSAGGAGLALENETCVPGADGLEAPVTEGPGSVD |
| | | EKLPAPEPCVGMSCPPGWGHLDATSAGEKAPSPWGSIRTGAQAAHVWTPA |
| | | AGSCSVSCGRGLMELRFLCMDSALRVPVQEELCGLASKPGSRREVCQAVP |
| | | CPARWQYKLAACSVSCGRGVVRRILYCARAHGEDDGEEILLDTQCQGLPR |
| | | PEPQEACSLEPCPPRWKVMSLGPCSASCGLGTARRSVACVQLDQGQDVEV |
| | | DEAACAALVRPEASVPCLIADCTYRWHVGTWMECSVSCGDGIQRRRDTCL |
| | | GPQAQAPVPADFCQHLPKPVTVRGCWAGPCVGQGTPSLVPHEEAAAPGRT |
| | | TATPAGASLEWSQARGLLFSPAPQKRRLLPGPQENSVQSSACGRQHLEPT |
| | | GTIDMRGPGQADCAVAIGRPLGEVVTLRVLESSLNCSAGDMLLLWGRLTW |
| | | RKMCRKLLDMTFSSKTNTLVVRQRCGRPGGGVLLRYGSQLAPETFYRECD |
| | | MQLFGPWGEIVSPSLSPATSNAGGCRLFINVAPHARIAIHALATNMGAGT |
| | | EGANASYILIRDTHSLRTTAFHGQQVLYWESESSQAEMEFSEGFLKAQAS |
| | | LRGQYWTLQSWVPEMQDPQSWKGKEGTSRGPFEQKLISEEDLNMHTGHHH |
| | | HHH |
| 111 | Exemplified P11751 | MHQRHPRARCPPLCVAGILACGFLLGCWGPSHFQQSCLQALEPQAVSSYL |
| | variant | SPGAPLKGRPPSPGFQRQRQRQRRAAGGILHLELLVAVGPDVFQAHQEDT |
| | | ERYVLTNLNIGAELLRDPSLGAQFRVHLVKMVILTEPEGAPNITANLTSS |
| | | LLSVCGWSQTINPEDDTDPGHADLVLYITRFDLELPDGNRQVRGVTQLGG |
| | | ACSPTWSCLITEDTGFDLGVTIAHEIGHSFGLEHDGAPGSGCGPSGHVMA |
| | | SDGAAPRAGLAWSPCSRRQLLSLLSAGRARCVWDPPRPQPGSAGHPPDAQ |
| | | PGLYYSANEQCRVAFGPKAVACTFAREHLDMCQALSCHTDPLDQSSCSRL |
| | | LVPLLDGTECGVEKWCSKGRCRSLVELTPIAAVHGRWSSWGPRSPCSRSC |
| | | GGGVVTRRRQCNNPRPAFGGRACVGADLQAEMCNTQACEKTQLEFMSQQC |
| | | ARTDGQPLRSSPGGASFYHWGAAVPHSQGDALCRHMCRAIGESFIMKRGD |
| | | SFLDGTRCMPSGPREDGTLSLCVSGSCRTFGCDGRMDSQQVWDRCQVCGG |
| | | DNSTCSPRKGSFTAGRAREYVTFLTVTPNLTSVYIANHRPLFTHLAVRIG |
| | | GRYVVAGKMSISPNTTYPSLLEDGRVEYRVALTEDRLPRLEEIRIWGPLQ |
| | | EDADIQVYRRYGEEYGNLTRPDITFTYFQPKPRQAWVWAAVRGPCSVSCG |
| | | AGLRWVNYSCLDQARKELVETVQCQGSQQPPAWPEACVLEPCPPYWAVGD |
| | | FGPCSASCGGGLRERPVRCVEAQGSLLKTLPPARCRAGAQQPAVALETCN |
| | | PQPCPARWEVSEPSSCTSAGGAGLALENETCVPGADGLEAPVTEGPGSVD |
| | | EKLPAPEPCVGMSCPPGWGHLDATSAGEKAPSPWGSIRTGAQAAHVWTPA |
| | | AGSCSVSCGRGLMELRFLCMDSALRVPVQEELCGLASKPGSRREVCQAVP |
| | | CPARWQYKLAACSVSCGRGVVRRILYCARAHGEDDGEEILLDTQCQGLPR |
| | | PEPQEACSLEPCPPRWKVMSLGPCSASCGLGTARRSVACVQLDQGQDVEV |
| | | DEAACAALVRPEASVPCLIADCTYRWHVGTWMECSVSCGDGIQRRRDTCL |
| | | GPQAQAPVPADFCQHLPKPVTVRGCWAGPCVGQGTPSLVPHEEAAAPGRT |
| | | TATPAGASLEWSQARGLLFSPAPQIRRLLPGPQENSVQSSACGRQHLEPT |
| | | GTIDMRGPGQADCAVAIGRPLGEVVTLRVLESSLNCSAGDMLLLWGRLTW |
| | | RKMCRKLLDMTFSSKTNTLVVRQRCGRPGGGVLLRYGSQLAPETFYRECD |
| | | MQLFGPWGEIVSPSLSPATSNAGGCRLFINVAPHARIAIHALATNMGAGT |
| | | EGANASYILIRDTHSLRTTAFHGQQVLYWESESSQAEMEFSEGFLKAQAS |
| | | LRGQYWTLQSWVPEMQDPQSWKGKEGTSRGPFEQKLISEEDLNMHTGHHH |
| | | HHH |
| 112 | Exemplified P1180K | MHQRHPRARCPPLCVAGILACGFLLGCWGPSHFQQSCLQALEPQAVSSYL |
| | variant | SPGAPLKGRPPSPGFQRQRQRQRRAAGGILHLELLVAVGPDVFQAHQEDT |
| | | ERYVLTNLNIGAELLRDPSLGAQFRVHLVKMVILTEPEGAPNITANLTSS |
| | | LLSVCGWSQTINPEDDTDPGHADLVLYITRFDLELPDGNRQVRGVTQLGG |
| | | ACSPTWSCLITEDTGFDLGVTIAHEIGHSFGLEHDGAPGSGCGPSGHVMA |
| | | SDGAAPRAGLAWSPCSRRQLLSLLSAGRARCVWDPPRPQPGSAGHPPDAQ |
| | | PGLYYSANEQCRVAFGPKAVACTFAREHLDMCQALSCHTDPLDQSSCSRL |
| | | LVPLLDGTECGVEKWCSKGRCRSLVELTPIAAVHGRWSSWGPRSPCSRSC |
| | | GGGVVTRRRQCNNPRPAFGGRACVGADLQAEMCNTQACEKTQLEFMSQQC |
| | | ARTDGQPLRSSPGGASFYHWGAAVPHSQGDALCRHMCRAIGESFIMKRGD |
| | | SFLDGTRCMPSGPREDGTLSLCVSGSCRTFGCDGRMDSQQVWDRCQVCGG |
| | | DNSTCSPRKGSFTAGRAREYVTFLTVTPNLTSVYIANHRPLFTHLAVRIG |
| | | GRYVVAGKMSISPNTTYPSLLEDGRVEYRVALTEDRLPRLEEIRIWGPLQ |
| | | EDADIQVYRRYGEEYGNLTRPDITFTYFQPKPRQAWVWAAVRGPCSVSCG |
| | | AGLRWVNYSCLDQARKELVETVQCQGSQQPPAWPEACVLEPCPPYWAVGD |
| | | FGPCSASCGGGLRERPVRCVEAQGSLLKTLPPARCRAGAQQPAVALETCN |
| | | PQPCPARWEVSEPSSCTSAGGAGLALENETCVPGADGLEAPVTEGPGSVD |
| | | EKLPAPEPCVGMSCPPGWGHLDATSAGEKAPSPWGSIRTGAQAAHVWTPA |
| | | AGSCSVSCGRGLMELRFLCMDSALRVPVQEELCGLASKPGSRREVCQAVP |
| | | CPARWQYKLAACSVSCGRGVVRRILYCARAHGEDDGEEILLDTQCQGLPR |
| | | PEPQEACSLEPCPPRWKVMSLGPCSASCGLGTARRSVACVQLDQGQDVEV |
| | | DEAACAALVRPEASVPCLIADCTYRWHVGTWMECSVSCGDGIQRRRDTCL |
| | | GPQAQAPVPADFCQHLPKPVTVRGCWAGPCVGQGTPSLVPHEEAAAPGRT |
| | | TATPAGASLEWSQARGLLFSPAPQPRRLLKGPQENSVQSSACGRQHLEPT |
| | | GTIDMRGPGQADCAVAIGRPLGEVVTLRVLESSLNCSAGDMLLLWGRLTW |
| | | RKMCRKLLDMTFSSKTNTLVVRQRCGRPGGGVLLRYGSQLAPETFYRECD |
| | | MQLFGPWGEIVSPSLSPATSNAGGCRLFINVAPHARIAIHALATNMGAGT |
| | | EGANASYILIRDTHSLRTTAFHGQQVLYWESESSQAEMEFSEGFLKAQAS |
| | | LRGQYWTLQSWVPEMQDPQSWKGKEGTSRGPFEQKLISEEDLNMHTGHHH |
| | | HHH |
| 113 | Exemplified P11801 | MHQRHPRARCPPLCVAGILACGFLLGCWGPSHFQQSCLQALEPQAVSSYL |
| | variant | SPGAPLKGRPPSPGFQRQRQRQRRAAGGILHLELLVAVGPDVFQAHQEDT |
| | | ERYVLTNLNIGAELLRDPSLGAQFRVHLVKMVILTEPEGAPNITANLTSS |
| | | LLSVCGWSQTINPEDDTDPGHADLVLYITRFDLELPDGNRQVRGVTQLGG |
| | | ACSPTWSCLITEDTGFDLGVTIAHEIGHSFGLEHDGAPGSGCGPSGHVMA |
| | | SDGAAPRAGLAWSPCSRRQLLSLLSAGRARCVWDPPRPQPGSAGHPPDAQ |
| | | PGLYYSANEQCRVAFGPKAVACTFAREHLDMCQALSCHTDPLDQSSCSRL |
| | | LVPLLDGTECGVEKWCSKGRCRSLVELTPIAAVHGRWSSWGPRSPCSRSC |
| | | GGGVVTRRRQCNNPRPAFGGRACVGADLQAEMCNTQACEKTQLEFMSQQC |
| | | ARTDGQPLRSSPGGASFYHWGAAVPHSQGDALCRHMCRAIGESFIMKRGD |
| | | SFLDGTRCMPSGPREDGTLSLCVSGSCRTFGCDGRMDSQQVWDRCQVCGG |
| | | DNSTCSPRKGSFTAGRAREYVTFLTVTPNLTSVYIANHRPLFTHLAVRIG |
| | | GRYVVAGKMSISPNTTYPSLLEDGRVEYRVALTEDRLPRLEEIRIWGPLQ |
| | | EDADIQVYRRYGEEYGNLTRPDITFTYFQPKPRQAWVWAAVRGPCSVSCG |
| | | AGLRWVNYSCLDQARKELVETVQCQGSQQPPAWPEACVLEPCPPYWAVGD |
| | | FGPCSASCGGGLRERPVRCVEAQGSLLKTLPPARCRAGAQQPAVALETCN |
| | | PQPCPARWEVSEPSSCTSAGGAGLALENETCVPGADGLEAPVTEGPGSVD |
| | | EKLPAPEPCVGMSCPPGWGHLDATSAGEKAPSPWGSIRTGAQAAHVWTPA |
| | | AGSCSVSCGRGLMELRFLCMDSALRVPVQEELCGLASKPGSRREVCQAVP |
| | | CPARWQYKLAACSVSCGRGVVRRILYCARAHGEDDGEEILLDTQCQGLPR |
| | | PEPQEACSLEPCPPRWKVMSLGPCSASCGLGTARRSVACVQLDQGQDVEV |
| | | DEAACAALVRPEASVPCLIADCTYRWHVGTWMECSVSCGDGIQRRRDTCL |
| | | GPQAQAPVPADFCQHLPKPVTVRGCWAGPCVGQGTPSLVPHEEAAAPGRT |
| | | TATPAGASLEWSQARGLLFSPAPQPRRLLIGPQENSVQSSACGRQHLEPT |
| | | GTIDMRGPGQADCAVAIGRPLGEVVTLRVLESSLNCSAGDMLLLWGRLTW |
| | | RKMCRKLLDMTFSSKTNTLVVRQRCGRPGGGVLLRYGSQLAPETFYRECD |
| | | MQLFGPWGEIVSPSLSPATSNAGGCRLFINVAPHARIAIHALATNMGAGT |
| | | EGANASYILIRDTHSLRTTAFHGQQVLYWESESSQAEMEFSEGFLKAQAS |
| | | LRGQYWTLQSWVPEMQDPQSWKGKEGTSRGPFEQKLISEEDLNMHTGHHH |
| | | HHH |
| 114 | Exemplified P1182K | MHQRHPRARCPPLCVAGILACGFLLGCWGPSHFQQSCLQALEPQAVSSYL |
| | variant | SPGAPLKGRPPSPGFQRQRQRQRRAAGGILHLELLVAVGPDVFQAHQEDT |
| | | ERYVLTNLNIGAELLRDPSLGAQFRVHLVKMVILTEPEGAPNITANLTSS |
| | | LLSVCGWSQTINPEDDTDPGHADLVLYITRFDLELPDGNRQVRGVTQLGG |
| | | ACSPTWSCLITEDTGFDLGVTIAHEIGHSFGLEHDGAPGSGCGPSGHVMA |
| | | SDGAAPRAGLAWSPCSRRQLLSLLSAGRARCVWDPPRPQPGSAGHPPDAQ |
| | | PGLYYSANEQCRVAFGPKAVACTFAREHLDMCQALSCHTDPLDQSSCSRL |
| | | LVPLLDGTECGVEKWCSKGRCRSLVELTPIAAVHGRWSSWGPRSPCSRSC |
| | | GGGVVTRRRQCNNPRPAFGGRACVGADLQAEMCNTQACEKTQLEFMSQQC |
| | | ARTDGQPLRSSPGGASFYHWGAAVPHSQGDALCRHMCRAIGESFIMKRGD |
| | | SFLDGTRCMPSGPREDGTLSLCVSGSCRTFGCDGRMDSQQVWDRCQVCGG |
| | | DNSTCSPRKGSFTAGRAREYVTFLTVTPNLTSVYIANHRPLFTHLAVRIG |
| | | GRYVVAGKMSISPNTTYPSLLEDGRVEYRVALTEDRLPRLEEIRIWGPLQ |
| | | EDADIQVYRRYGEEYGNLTRPDITFTYFQPKPRQAWVWAAVRGPCSVSCG |
| | | AGLRWVNYSCLDQARKELVETVQCQGSQQPPAWPEACVLEPCPPYWAVGD |
| | | FGPCSASCGGGLRERPVRCVEAQGSLLKTLPPARCRAGAQQPAVALETCN |
| | | PQPCPARWEVSEPSSCTSAGGAGLALENETCVPGADGLEAPVTEGPGSVD |
| | | EKLPAPEPCVGMSCPPGWGHLDATSAGEKAPSPWGSIRTGAQAAHVWTPA |
| | | AGSCSVSCGRGLMELRFLCMDSALRVPVQEELCGLASKPGSRREVCQAVP |
| | | CPARWQYKLAACSVSCGRGVVRRILYCARAHGEDDGEEILLDTQCQGLPR |
| | | PEPQEACSLEPCPPRWKVMSLGPCSASCGLGTARRSVACVQLDQGQDVEV |
| | | DEAACAALVRPEASVPCLIADCTYRWHVGTWMECSVSCGDGIQRRRDTCL |
| | | GPQAQAPVPADFCQHLPKPVTVRGCWAGPCVGQGTPSLVPHEEAAAPGRT |
| | | TATPAGASLEWSQARGLLFSPAPQPRRLLPGKQENSVQSSACGRQHLEPT |
| | | GTIDMRGPGQADCAVAIGRPLGEVVTLRVLESSLNCSAGDMLLLWGRLTW |
| | | RKMCRKLLDMTFSSKTNTLVVRQRCGRPGGGVLLRYGSQLAPETFYRECD |
| | | MQLFGPWGEIVSPSLSPATSNAGGCRLFINVAPHARIAIHALATNMGAGT |
| | | EGANASYILIRDTHSLRTTAFHGQQVLYWESESSQAEMEFSEGFLKAQAS |
| | | LRGQYWTLQSWVPEMQDPQSWKGKEGTSRGPFEQKLISEEDLNMHTGHHH |
| | | HHH |
| 115 | Exemplified P11821 | MHQRHPRARCPPLCVAGILACGFLLGCWGPSHFQQSCLQALEPQAVSSYL |
| | variant | SPGAPLKGRPPSPGFQRQRQRQRRAAGGILHLELLVAVGPDVFQAHQEDT |
| | | ERYVLTNLNIGAELLRDPSLGAQFRVHLVKMVILTEPEGAPNITANLTSS |
| | | LLSVCGWSQTINPEDDTDPGHADLVLYITRFDLELPDGNRQVRGVTQLGG |
| | | ACSPTWSCLITEDTGFDLGVTIAHEIGHSFGLEHDGAPGSGCGPSGHVMA |
| | | SDGAAPRAGLAWSPCSRRQLLSLLSAGRARCVWDPPRPQPGSAGHPPDAQ |
| | | PGLYYSANEQCRVAFGPKAVACTFAREHLDMCQALSCHTDPLDQSSCSRL |
| | | LVPLLDGTECGVEKWCSKGRCRSLVELTPIAAVHGRWSSWGPRSPCSRSC |
| | | GGGVVTRRRQCNNPRPAFGGRACVGADLQAEMCNTQACEKTQLEFMSQQC |
| | | ARTDGQPLRSSPGGASFYHWGAAVPHSQGDALCRHMCRAIGESFIMKRGD |
| | | SFLDGTRCMPSGPREDGTLSLCVSGSCRTFGCDGRMDSQQVWDRCQVCGG |
| | | DNSTCSPRKGSFTAGRAREYVTFLTVTPNLTSVYIANHRPLFTHLAVRIG |
| | | GRYVVAGKMSISPNTTYPSLLEDGRVEYRVALTEDRLPRLEEIRIWGPLQ |
| | | EDADIQVYRRYGEEYGNLTRPDITFTYFQPKPRQAWVWAAVRGPCSVSCG |
| | | AGLRWVNYSCLDQARKELVETVQCQGSQQPPAWPEACVLEPCPPYWAVGD |
| | | FGPCSASCGGGLRERPVRCVEAQGSLLKTLPPARCRAGAQQPAVALETCN |
| | | PQPCPARWEVSEPSSCTSAGGAGLALENETCVPGADGLEAPVTEGPGSVD |
| | | EKLPAPEPCVGMSCPPGWGHLDATSAGEKAPSPWGSIRTGAQAAHVWTPA |
| | | AGSCSVSCGRGLMELRFLCMDSALRVPVQEELCGLASKPGSRREVCQAVP |
| | | CPARWQYKLAACSVSCGRGVVRRILYCARAHGEDDGEEILLDTQCQGLPR |
| | | PEPQEACSLEPCPPRWKVMSLGPCSASCGLGTARRSVACVQLDQGQDVEV |
| | | DEAACAALVRPEASVPCLIADCTYRWHVGTWMECSVSCGDGIQRRRDTCL |
| | | GPQAQAPVPADFCQHLPKPVTVRGCWAGPCVGQGTPSLVPHEEAAAPGRT |
| | | TATPAGASLEWSQARGLLFSPAPQPRRLLPGIQENSVQSSACGRQHLEPT |
| | | GTIDMRGPGQADCAVAIGRPLGEVVTLRVLESSLNCSAGDMLLLWGRLTW |
| | | RKMCRKLLDMTFSSKTNTLVVRQRCGRPGGGVLLRYGSQLAPETFYRECD |
| | | MQLFGPWGEIVSPSLSPATSNAGGCRLFINVAPHARIAIHALATNMGAGT |
| | | EGANASYILIRDTHSLRTTAFHGQQVLYWESESSQAEMEFSEGFLKAQAS |
| | | LRGQYWTLQSWVPEMQDPQSWKGKEGTSRGPFEQKLISEEDLNMHTGHHH |
| | | HHH |
| 116 | Exemplified A1144K | ATGCACCAGCGTCACCCCCGGGCAAGATGCCCTCCCCTCTGTGTGGCCGG |
| | variant nucleotide | AATCCTTGCCTGTGGCTTTCTCCTGGGCTGCTGGGGACCCTCCCATTTCC |
| | sequence | AGCAGAGGTGTCTTCAGGCTTTGGAGCCACAGGCCGTGTCTTCTTACTTG |
| | | AGCCCTGGTGCTCCCTTAAAAGGCCGCCCTCCTTCCCCTGGCTTCCAGAG |
| | | GCAGAGGCAGAGGCAGAGGGGGGCTGCAGGCGGCATCCTACACCTGGAGC |
| | | TGCTGGTGGCCGTGGGCCCCGATGTCTTCCAGGCTCACCAGGAGGACACA |
| | | GAGCGCTATGTGCTCACCAACCTCAACATCGGGGCAGAACTGCTTCGGGA |
| | | CCCGTCCCTGGGGGCTCAGTTTCGGGTGCACCTGGTGAAGATGGTCATTC |
| | | TGACAGAGCCTGAGGGTGCTCCAAATATCACAGCCAACCTCACCTCGTCC |
| | | CTGCTGAGCGTCTGTGGGTGGAGCCAGACCATCAACCCTGAGGACGACAC |
| | | GGATCCTGGCCATGCTGACCTGGTCCTCTATATCACTAGGTTTGACCTGG |
| | | AGTTGCCTGATGGTAACCGGCAGGTGCGGGGCGTCACCCAGCTGGGCGGT |
| | | GCCTGCTCCCCAACCTGGAGCTGCCTCATTACCGAGGACACTGGCTTCGA |
| | | CCTGGGAGTCACCATTGCCCATGAGATTGGGCACAGCTTCGGCCTGGAGC |
| | | ACGACGGCGCGCCCGGCAGCGGCTGCGGCCCCAGCGGACACGTGATGGCT |
| | | TCGGACGGCGCCGCGCCCCGCGCCGGCCTCGCCTGGTCCCCCTGCAGCCG |
| | | CCGGCAGCTGCTGAGCCTGCTCAGCGCAGGACGGGGGCGCTGCGTGTGGG |
| | | ACCCGCCGCGGCCTCAACCCGGGTCCGCGGGGCACCCGCCGGATGCGCAG |
| | | CCTGGCCTCTACTACAGCGCCAACGAGCAGTGCCGCGTGGCCTTCGGCCC |
| | | CAAGGCTGTCGCCTGCACCTTCGCCAGGGAGCACCTGGATATGTGCCAGG |
| | | CCCTCTCCTGCCACACAGACCCGCTGGACCAAAGCAGCTGCAGCCGCCTC |
| | | CTCGTTCCTCTCCTGGATGGGACAGAATGTGGCGTGGAGAAGTGGTGCTC |
| | | CAAAGGTCGCTGCCGCTCCCTGGTGGAGCTGACCCCCATAGCAGCAGTGC |
| | | ATGGGCGCTGGTCTAGCTGGGGTCCCCGAAGTCCTTGCTCCCGCTCCTGC |
| | | GGAGGAGGTGTGGTCACCAGGAGGCGGCAGTGCAACAACCCCAGACCTGC |
| | | CTTTGGGGGGCGTGCATGTGTTGGTGCTGACCTCCAGGCCGAGATGTGCA |
| | | ACACTCAGGCCTGCGAGAAGACCCAGCTGGAGTTCATGTCGCAACAGTGC |
| | | GCCAGGACCGACGGCCAGCCGCTGCGCTCCTCCCCTGGCGGCGCCTCCTT |
| | | CTACCACTGGGGTGCTGCTGTACCACACAGCCAAGGGGATGCTCTGTGCA |
| | | GACACATGTGCCGGGCCATTGGCGAGAGCTTCATCATGAAGCGTGGAGAC |
| | | AGCTTCCTCGATGGGACCCGGTGTATGCCAAGTGGCCCCCGGGAGGACGG |
| | | GACCCTGAGCCTGTGTGTGTCGGGCAGCTGCAGGACATTTGGCTGTGATG |
| | | GTAGGATGGACTCCCAGCAGGTATGGGACAGGTGCCAGGTGTGTGGTGGG |
| | | GACAACAGCACGTGCAGCCCACGGAAGGGCTCTTTCACAGCTGGCAGAGC |
| | | GAGAGAATATGTCACGTTTCTGACAGTTACCCCCAACCTGACCAGTGTCT |
| | | ACATTGCCAACCACAGGCCTCTCTTCACACACTTGGCGGTGAGGATCGGA |
| | | GGGCGCTATGTCGTGGCTGGGAAGATGAGCATCTCCCCTAACACCACCTA |
| | | CCCCTCCCTCCTGGAGGATGGTCGTGTCGAGTACAGAGTGGCCCTCACCG |
| | | AGGACCGGCTGCCCCGCCTGGAGGAGATCCGCATCTGGGGACCCCTCCAG |
| | | GAAGATGCTGACATCCAGGTTTACAGGCGGTATGGCGAGGAGTATGGCAA |
| | | CCTCACCCGCCCAGACATCACCTTCACCTACTTCCAGCCTAAGCCACGGC |
| | | AGGCCTGGGTGTGGGCCGCTGTGCGTGGGCCCTGCTCGGTGAGCTGTGGG |
| | | GCAGGGCTGCGCTGGGTAAACTACAGCTGCCTGGACCAGGCCAGGAAGGA |
| | | GTTGGTGGAGACTGTCCAGTGCCAAGGGAGCCAGCAGCCACCAGCGTGGC |
| | | CAGAGGCCTGCGTGCTCGAACCCTGCCCTCCCTACTGGGCGGTGGGAGAC |
| | | TTCGGCCCATGCAGCGCCTCCTGTGGGGGTGGCCTGGGGGAGCGGCCAGT |
| | | GCGCTGCGTGGAGGCCCAGGGCAGCCTCCTGAAGACATTGCCCCCAGCCC |
| | | GGTGCAGAGCAGGGGCCCAGCAGCCAGCTGTGGCGCTGGAAACCTGCAAC |
| | | CCCCAGCCCTGCCCTGCCAGGTGGGAGGTGTCAGAGCCCAGCTCATGCAC |
| | | ATCAGCTGGTGGAGCAGGCCTGGCCTTGGAGAACGAGACCTGTGTGCCAG |
| | | GGGCAGATGGCCTGGAGGCTCCAGTGACTGAGGGGCCTGGCTCCGTAGAT |
| | | GAGAAGCTGCCTGCCCCTGAGCCCTGTGTCGGGATGTCATGTCCTCCAGG |
| | | CTGGGGCCATCTGGATGCCACCTCTGCAGGGGAGAAGGCTCCCTCCCCAT |
| | | GGGGCAGCATCAGGACGGGGGCTCAAGCTGCACACGTGTGGACCCCTGCG |
| | | GCAGGGTCGTGCTCCGTCTCCTGCGGGCGAGGTCTGATGGAGCTCCGTTT |
| | | CCTGTGCATGGACTCTGCCCTCAGGGTGCCTGTCCAGGAAGAGCTGTGTG |
| | | GCCTGGCAAGCAAGCCTGGGAGCCGGCGGGAGGTCTGCCAGGCTGTCCCG |
| | | TGCCCTGCTCGGTGGCAGTACAAGCTGGCGGCCTGCAGCGTGAGCTGTGG |
| | | GAGAGGGGTCGTGCGGAGGATCCTGTATTGTGCCCGGGCCCATGGGGAGG |
| | | ACGATGGTGAGGAGATCCTGTTGGACACCCAGTGCCAGGGGCTGCCTCGC |
| | | CCGGAACCCCAGGAGGCCTGCAGCCTGGAGCCCTGCCCACCTAGGTGGAA |
| | | AGTCATGTCCCTTGGCCCATGTTCGGCCAGCTGTGGCCTTGGCACTGCTA |
| | | GACGCTCGGTGGCCTGTGTGCAGCTCGACCAAGGCCAGGACGTGGAGGTG |
| | | GACGAGGCGGCCTGTGCGGCGCTGGTGCGGCCCGAGGCCAGTGTCCCCTG |
| | | TCTCATTGCCGACTGCACCTACCGCTGGCATGTTGGCACCTGGATGGAGT |
| | | GCTCTGTTTCCTGTGGGGATGGCATCCAGCGCCGGCGTGACACCTGCCTC |
| | | GGACCCCAGGCCCAGGCGCCTGTGCCAGCTGATTTCTGCCAGCACTTGCC |
| | | CAAGCCGGTGACTGTGCGTGGCTGCTGGGCTGGGCCCTGTGTGGGACAGG |
| | | GTACGCCCAGCCTGGTGCCCCACGAAGAAAAGGCTGCTCCAGGACGGACC |
| | | ACAGCCACCCCTGCTGGTGCCTCCCTGGAGTGGTCCCAGGCCCGGGGCCT |
| | | GCTCTTCTCCCCGGCTCCCCAGCCTCGGCGGCTCCTGCCCGGGCCCCAGG |
| | | AAAACTCAGTGCAGTCCAGTGCCTGTGGCAGGCAGCACCTTGAGCCAACA |
| | | GGAACCATTGACATGCGAGGCCCAGGGGAGGCAGACTGTGCAGTGGCCAT |
| | | TGGGGGGCCCCTCGGGGAGGTGGTGACCCTCCGCGTCCTTGAGAGTTCTC |
| | | TCAACTGCAGTGCGGGGGACATGTTGCTGCTTTGGGGCCGGCTCACCTGG |
| | | AGGAAGATGTGCAGGAAGCTGTTGGACATGACTTTCAGCTCCAAGACCAA |
| | | CACGCTGGTGGTGAGGCAGCGCTGCGGGGGGCCAGGAGGTGGGGTGCTGC |
| | | TGCGGTATGGGAGCCAGCTTGCTCCTGAAACCTTCTACAGAGAATGTGAC |
| | | ATGCAGCTCTTTGGGCCCTGGGGTGAAATCGTGAGCCCCTCGCTGAGTCC |
| | | AGCCACGAGTAATGCAGGGGGCTGCCGGCTCTTCATTAATGTGGCTCCGC |
| | | ACGCACGGATTGCCATCCATGCCCTGGCCACCAACATGGGCGCTGGGACC |
| | | GAGGGAGCCAATGCCAGCTACATCTTGATCCGGGACACCCACAGCTTGAG |
| | | GACCACAGCGTTCCATGGGCAGCAGGTGCTCTACTGGGAGTCAGAGAGCA |
| | | GCCAGGCTGAGATGGAGTTCAGCGAGGGCTTCCTGAAGGCTCAGGCCAGC |
| | | CTGCGGGGCCAGTACTGGACCCTCCAATCATGGGTACCGGAGATGCAGGA |
| | | CCCTCAGTCCTGGAAGGGAAAGGAAGGAACCTCTAGAGGGCCCTTCGAAC |
| | | AAAAACTCATCTCAGAAGAGGATCTGAATATGCATACCGGTCATCATCAC |
| | | CATCACCAT |
| 117 | Exemplified A11441 | ATGCACCAGCGTCACCCCCGGGCAAGATGCCCTCCCCTCTGTGTGGCCGG |
| | variant nucleotide | AATCCTTGCCTGTGGCTTTCTCCTGGGCTGCTGGGGACCCTCCCATTTCC |
| | sequence | AGCAGAGCTGTCTTCAGGCTTTGGAGCCACAGGCCGTGTCTTCTTACTTG |
| | | AGCCCTGGTGCTCCCTTAAAAGGCCGCCCTCCTTCCCCTGGCTTCCAGAG |
| | | GCAGAGGCAGAGGCAGAGGGGGGCTGCAGGCGGCATCCTACACCTGGAGC |
| | | TGCTGGTGGCCGTGGGCCCCGATGTCTTCCAGGCTCACCAGGAGGACACA |
| | | GAGCGCTATGTGCTCACCAACCTCAACATCGGGGCAGAACTGCTTCGGGA |
| | | CCCGTCCCTGGGGGCTCAGTTTCGGGTGCACCTGGTGAAGATGGTCATTC |
| | | TGACAGAGCCTGAGGGTGCTCCAAATATCACAGCCAACCTCACCTCGTCC |
| | | CTGCTGAGCGTCTGTGGGTGGAGCCAGACCATCAACCCTGAGGACGACAC |
| | | GGATCCTGGCCATGCTGACCTGGTCCTCTATATCACTAGGTTTGACCTGG |
| | | AGTTGCCTGATGGTAACCGGCAGGTGCGGGGCGTCACCCAGCTGGGCGGT |
| | | GCCTGCTCCCCAACCTGGAGCTGCCTCATTACCGAGGACACTGGCTTCGA |
| | | CCTGGGAGTCACCATTGCCCATGAGATTGGGCACAGCTTCGGCCTGGAGC |
| | | ACGACGGCGCGCCCGGCAGCGGCTGCGGCCCCAGCGGACACGTGATGGCT |
| | | TCGGACGGCGCCGCGCCCCGCGCCGGCCTCGCCTGGTCCCCCTGCAGCCG |
| | | CCGGCAGCTGCTGAGCCTGCTCAGCGCAGGACGGGCGCGCTGCGTGTGGG |
| | | ACCCGCCGCGGCCTCAACCCGGGTCCGGGGGGCACCCGCCGGATGCGCAG |
| | | CCTGGCCTCTACTACAGCGCCAACGAGCAGTGCCGCGTGGCCTTCGGCCC |
| | | CAAGGCTGTCGCCTGCACCTTCGCCAGGGAGCACCTGGATATGTGCCAGG |
| | | CCCTCTCCTGCCACACAGACCCGCTGGACCAAAGCAGCTGCAGCCGCCTC |
| | | CTCGTTCCTCTCCTGGATGGGACAGAATGTGGCGTGGAGAAGTGGTGCTC |
| | | CAAAGGTCGCTGCCGCTCCCTGGTGGAGCTGACCCCCATAGCAGCAGTGC |
| | | ATGGGCGCTGGTCTAGCTGGGGTCCCCGAAGTCCTTGCTCCCGCTCCTGC |
| | | GGAGGAGGTGTGGTCACCAGGAGGCGGCAGTGCAACAACCCCAGACCTGC |
| | | CTTTGGGGGGCGTGCATGTGTTGGTGCTGACCTCCAGGCCGAGATGTGCA |
| | | ACACTCAGGCCTGCGAGAAGACCCAGCTGGAGTTCATGTCGCAACAGTGC |
| | | GCCAGGACCGACGGCCAGCCGCTGCGCTCCTCCCCTGGCGGCGCCTCCTT |
| | | CTACCACTGGGGTGCTGCTGTACCACACAGCCAAGGGGATGCTCTGTGCA |
| | | GACACATGTGCCGGGCCATTGGCGAGAGCTTCATCATGAAGCGTGGAGAC |
| | | AGCTTCCTCGATGGGACCCGGTGTATGCCAAGTGGCCCCCGGGAGGACGG |
| | | GACCCTGAGCCTGTGTGTGTCGGGCAGCTGCAGGACATTTGGCTGTGATG |
| | | GTAGGATGGACTCCCAGCAGGTATGGGACAGGTGCCAGGTGTGTGGTGGG |
| | | GACAACAGCACGTGCAGCCCACGGAAGGGCTCTTTCACAGCTGGCAGAGC |
| | | GAGAGAATATGTCACGTTTCTGACAGTTACCCCCAACCTGACCAGTGTCT |
| | | ACATTGCCAACCACAGGCCTCTCTTCACACACTTGGCGGTGAGGATCGGA |
| | | GGGCGCTATGTCGTGGCTGGGAAGATGAGCATCTCCCCTAACACCACCTA |
| | | CCCCTCCCTCCTGGAGGATGGTCGTGTCGAGTACAGAGTGGCCCTCACCG |
| | | AGGACCGGCTGCCCCGCCTGGAGGAGATCCGCATCTGGGGACCCCTCCAG |
| | | GAAGATGCTGACATCCAGGTTTACAGGCGGTATGGCGAGGAGTATGGCAA |
| | | CCTCACCCGCCCAGACATCACCTTCACCTACTTCCAGCCTAAGCCACGGC |
| | | AGGCCTGGGTGTGGGCCGCTGTGCGTGGGCCCTGCTCGGTGAGCTGTGGG |
| | | GCAGGGCTGCGCTGGGTAAACTACAGCTGCCTGGACCAGGCCAGGAAGGA |
| | | GTTGGTGGAGACTGTCCAGTGCCAAGGGAGCCAGCAGCCACCAGCGTGGC |
| | | CAGAGGCCTGCGTGCTCGAACCCTGCCCTCCCTACTGGGCGGTGGGAGAC |
| | | TTCGGCCCATGCAGCGCCTCCTGTGGGGGTGGCCTGCGGGAGCGGCCAGT |
| | | GCGCTGCGTGGAGGCCCAGGGCAGCCTCCTGAAGACATTGCCCCCAGCCC |
| | | GGTGCAGAGCAGGGGCCCAGCAGCCAGCTGTGGCGCTGGAAACCTGCAAC |
| | | CCCCAGCCCTGCCCTGCCAGGTGGGAGGTGTCAGAGCCCAGCTCATGCAC |
| | | ATCAGCTGGTGGAGCAGGCCTGGCCTTGGAGAACGAGACCTGTGTGCCAG |
| | | GGGCAGATGGCCTGGAGGCTCCAGTGACTGAGGGGCCTGGCTCCGTAGAT |
| | | GAGAAGCTGCCTGCCCCTGAGCCCTGTGTCGGGATGTCATGTCCTCCAGG |
| | | CTGGGGCCATCTGGATGCCACCTCTGCAGGGGAGAAGGCTCCCTCCCCAT |
| | | GGGGCAGCATCAGGACGGGGGCTCAAGCTGCACACGTGTGGACCCCTGCG |
| | | GCAGGGTCGTGCTCCGTCTCCTGCGGGGGAGGTCTGATGGAGCTCCGTTT |
| | | CCTGTGCATGGACTCTGCCCTCAGGGTGCCTGTCCAGGAAGAGCTGTGTG |
| | | GCCTGGCAAGCAAGCCTGGGAGCCGGCGGGAGGTCTGCCAGGCTGTCCCG |
| | | TGCCCTGCTCGGTGGCAGTACAAGCTGGCGGCCTGCAGCGTGAGCTGTGG |
| | | GAGAGGGGTCGTGCGGAGGATCCTGTATTGTGCCCGGGCCCATGGGGAGG |
| | | ACGATGGTGAGGAGATCCTGTTGGACACCCAGTGCCAGGGGCTGCCTCGC |
| | | CCGGAACCCCAGGAGGCCTGCAGCCTGGAGCCCTGCCCACCTAGGTGGAA |
| | | AGTCATGTCCCTTGGCCCATGTTCGGCCAGCTGTGGCCTTGGCACTGCTA |
| | | GACGCTCGGTGGCCTGTGTGCAGCTCGACCAAGGCCAGGACGTGGAGGTG |
| | | GACGAGGCGGCCTGTGCGGCGCTGGTGCGGCCCGAGGCCAGTGTCCCCTG |
| | | TCTCATTGCCGACTGCACCTACCGCTGGCATGTTGGCACCTGGATGGAGT |
| | | GCTCTGTTTCCTGTGGGGATGGCATCCAGCGCCGGCGTGACACCTGCCTC |
| | | GGACCCCAGGCCCAGGCGCCTGTGCCAGCTGATTTCTGCCAGCACTTGCC |
| | | CAAGCCGGTGACTGTGCGTGGCTGCTGGGCTGGGCCCTGTGTGGGACAGG |
| | | GTACGCCCAGCCTGGTGCCCCACGAAGAAATTGCTGCTCCAGGACGGACC |
| | | ACAGCCACCCCTGCTGGTGCCTCCCTGGAGTGGTCCCAGGCCCGGGGCCT |
| | | GCTCTTCTCCCCGGCTCCCCAGCCTCGGCGGCTCCTGCCCGGGCCCCAGG |
| | | AAAACTCAGTGCAGTCCAGTGCCTGTGGCAGGCAGCACCTTGAGCCAACA |
| | | GGAACCATTGACATGCGAGGCCCAGGGCAGGCAGACTGTGCAGTGGCCAT |
| | | TGGGCGGCCCCTCGGGGAGGTGGTGACCCTCCGCGTCCTTGAGAGTTCTC |
| | | TCAACTGCAGTGCGGGGGACATGTTGCTGCTTTGGGGCCGGCTCACCTGG |
| | | AGGAAGATGTGCAGGAAGCTGTTGGACATGACTTTCAGCTCCAAGACCAA |
| | | CACGCTGGTGGTGAGGCAGCGCTGGGGGGGGCCAGGAGGTGGGGTGCTGC |
| | | TGCGGTATGGGAGCCAGCTTGCTCCTGAAACCTTCTACAGAGAATGTGAC |
| | | ATGCAGCTCTTTGGGCCCTGGGGTGAAATCGTGAGCCCCTCGCTGAGTCC |
| | | AGCCACGAGTAATGCAGGGGGCTGCCGGCTCTTCATTAATGTGGCTCCGC |
| | | ACGCACGGATTGCCATCCATGCCCTGGCCACCAACATGGGGGCTGGGACC |
| | | GAGGGAGCCAATGCCAGCTACATCTTGATCCGGGACACCCACAGCTTGAG |
| | | GACCACAGGGTTCCATGGGCAGCAGGTGCTCTACTGGGAGTCAGAGAGCA |
| | | GCCAGGCTGAGATGGAGTTCAGCGAGGGCTTCCTGAAGGCTCAGGCCAGC |
| | | CTGCGGGGCCAGTACTGGACCCTCCAATCATGGGTACCGGAGATGCAGGA |
| | | CCCTCAGTCCTGGAAGGGAAAGGAAGGAACCTCTAGAGGGCCCTTCGAAC |
| | | AAAAACTCATCTCAGAAGAGGATCTGAATATGCATACCGGTCATCATCAC |
| | | CATCACCAT |
| 118 | Exemplified A1145K | ATGCACCAGCGTCACCCCCGGGCAAGATGCCCTCCCCTCTGTGTGGCCGG |
| | variant nucleotide | AATCCTTGCCTGTGGCTTTCTCCTGGGCTGCTGGGGACCCTCCCATTTCC |
| | sequence | AGCAGAGCTGTCTTCAGGCTTTGGAGCCACAGGCCGTGTCTTCTTACTTG |
| | | AGCCCTGGTGCTCCCTTAAAAGGCCGCCCTCCTTCCCCTGGCTTCCAGAG |
| | | GCAGAGGCAGAGGCAGAGGGGGGCTGCAGGCGGCATCCTACACCTGGAGC |
| | | TGCTGGTGGCCGTGGGCCCCGATGTCTTCCAGGCTCACCAGGAGGACACA |
| | | GAGCGCTATGTGCTCACCAACCTCAACATCGGGGCAGAACTGCTTCGGGA |
| | | CCCGTCCCTGGGGGCTCAGTTTCGGGTGCACCTGGTGAAGATGGTCATTC |
| | | TGACAGAGCCTGAGGGTGCTCCAAATATCACAGCCAACCTCACCTCGTCC |
| | | CTGCTGAGCGTCTGTGGGTGGAGCCAGACCATCAACCCTGAGGACGACAC |
| | | GGATCCTGGCCATGCTGACCTGGTCCTCTATATCACTAGGTTTGACCTGG |
| | | AGTTGCCTGATGGTAACCGGCAGGTGCGGGGCGTCACCCAGCTGGGGGGT |
| | | GCCTGCTCCCCAACCTGGAGCTGCCTCATTACCGAGGACACTGGCTTCGA |
| | | CCTGGGAGTCACCATTGCCCATGAGATTGGGCACAGCTTCGGCCTGGAGC |
| | | ACGACGGCGCGCCCGGCAGCGGCTGCGGCCCCAGCGGACACGTGATGGCT |
| | | TCGGACGGCGCCGCGCCCCGCGCCGGCCTCGCCTGGTCCCCCTGCAGCCG |
| | | CCGGCAGCTGCTGAGCCTGCTCAGCGCAGGACGGGCGCGCTGCGTGTGGG |
| | | ACCCGCCGCGGCCTCAACCCGGGTCCGCGGGGCACCCGCCGGATGCGCAG |
| | | CCTGGCCTCTACTACAGCGCCAACGAGCAGTGCCGCGTGGCCTTCGGCCC |
| | | CAAGGCTGTCGCCTGCACCTTCGCCAGGGAGCACCTGGATATGTGCCAGG |
| | | CCCTCTCCTGCCACACAGACCCGCTGGACCAAAGCAGCTGCAGCCGCCTC |
| | | CTCGTTCCTCTCCTGGATGGGACAGAATGTGGCGTGGAGAAGTGGTGCTC |
| | | CAAAGGTCGCTGCCGCTCCCTGGTGGAGCTGACCCCCATAGCAGCAGTGC |
| | | ATGGGCGCTGGTCTAGCTGGGGTCCCCGAAGTCCTTGCTCCCGCTCCTGC |
| | | GGAGGAGGTGTGGTCACCAGGAGGCGGCAGTGCAACAACCCCAGACCTGC |
| | | CTTTGGGGGGCGTGCATGTGTTGGTGCTGACCTCCAGGCCGAGATGTGCA |
| | | ACACTCAGGCCTGCGAGAAGACCCAGCTGGAGTTCATGTCGCAACAGTGC |
| | | GCCAGGACCGACGGCCAGCCGCTGCGCTCCTCCCCTGGGGGCGCCTCCTT |
| | | CTACCACTGGGGTGCTGCTGTACCACACAGCCAAGGGGATGCTCTGTGCA |
| | | GACACATGTGCCGGGCCATTGGCGAGAGCTTCATCATGAAGCGTGGAGAC |
| | | AGCTTCCTCGATGGGACCCGGTGTATGCCAAGTGGCCCCCGGGAGGACGG |
| | | GACCCTGAGCCTGTGTGTGTCGGGCAGCTGCAGGACATTTGGCTGTGATG |
| | | GTAGGATGGACTCCCAGCAGGTATGGGACAGGTGCCAGGTGTGTGGTGGG |
| | | GACAACAGCACGTGCAGCCCACGGAAGGGCTCTTTCACAGCTGGCAGAGC |
| | | GAGAGAATATGTCACGTTTCTGACAGTTACCCCCAACCTGACCAGTGTCT |
| | | ACATTGCCAACCACAGGCCTCTCTTCACACACTTGGCGGTGAGGATCGGA |
| | | GGGCGCTATGTCGTGGCTGGGAAGATGAGCATCTCCCCTAACACCACCTA |
| | | CCCCTCCCTCCTGGAGGATGGTCGTGTCGAGTACAGAGTGGCCCTCACCG |
| | | AGGACCGGCTGCCCCGCCTGGAGGAGATCCGCATCTGGGGACCCCTCCAG |
| | | GAAGATGCTGACATCCAGGTTTACAGGCGGTATGGCGAGGAGTATGGCAA |
| | | CCTCACCCGCCCAGACATCACCTTCACCTACTTCCAGCCTAAGCCACGGC |
| | | AGGCCTGGGTGTGGGCCGCTGTGCGTGGGCCCTGCTCGGTGAGCTGTGGG |
| | | GCAGGGCTGCGCTGGGTAAACTACAGCTGCCTGGACCAGGCCAGGAAGGA |
| | | GTTGGTGGAGACTGTCCAGTGCCAAGGGAGCCAGCAGCCACCAGCGTGGC |
| | | CAGAGGCCTGCGTGCTCGAACCCTGCCCTCCCTACTGGGCGGTGGGAGAC |
| | | TTCGGCCCATGCAGCGCCTCCTGTGGGGGTGGCCTGCGGGAGCGGCCAGT |
| | | GCGCTGCGTGGAGGCCCAGGGCAGCCTCCTGAAGACATTGCCCCCAGCCC |
| | | GGTGCAGAGCAGGGGCCCAGCAGCCAGCTGTGGCGCTGGAAACCTGCAAC |
| | | CCCCAGCCCTGCCCTGCCAGGTGGGAGGTGTCAGAGCCCAGCTCATGCAC |
| | | ATCAGCTGGTGGAGCAGGCCTGGCCTTGGAGAACGAGACCTGTGTGCCAG |
| | | GGGCAGATGGCCTGGAGGCTCCAGTGACTGAGGGGCCTGGCTCCGTAGAT |
| | | GAGAAGCTGCCTGCCCCTGAGCCCTGTGTCGGGATGTCATGTCCTCCAGG |
| | | CTGGGGCCATCTGGATGCCACCTCTGCAGGGGAGAAGGCTCCCTCCCCAT |
| | | GGGGCAGCATCAGGACGGGGGCTCAAGCTGCACACGTGTGGACCCCTGCG |
| | | GCAGGGTCGTGCTCCGTCTCCTGCGGGCGAGGTCTGATGGAGCTCCGTTT |
| | | CCTGTGCATGGACTCTGCCCTCAGGGTGCCTGTCCAGGAAGAGCTGTGTG |
| | | GCCTGGCAAGCAAGCCTGGGAGCCGGGGGGAGGTCTGCCAGGCTGTCCCG |
| | | TGCCCTGCTCGGTGGCAGTACAAGCTGGCGGCCTGCAGCGTGAGCTGTGG |
| | | GAGAGGGGTCGTGCGGAGGATCCTGTATTGTGCCCGGGCCCATGGGGAGG |
| | | ACGATGGTGAGGAGATCCTGTTGGACACCCAGTGCCAGGGGCTGCCTCGC |
| | | CCGGAACCCCAGGAGGCCTGCAGCCTGGAGCCCTGCCCACCTAGGTGGAA |
| | | AGTCATGTCCCTTGGCCCATGTTCGGCCAGCTGTGGCCTTGGCACTGCTA |
| | | GACGCTCGGTGGCCTGTGTGCAGCTCGACCAAGGCCAGGACGTGGAGGTG |
| | | GACGAGGCGGCCTGTGCGGCGCTGGTGCGGCCCGAGGCCAGTGTCCCCTG |
| | | TCTCATTGCCGACTGCACCTACCGCTGGCATGTTGGCACCTGGATGGAGT |
| | | GCTCTGTTTCCTGTGGGGATGGCATCCAGCGCCGGCGTGACACCTGCCTC |
| | | GGACCCCAGGCCCAGGCGCCTGTGCCAGCTGATTTCTGCCAGCACTTGCC |
| | | CAAGCCGGTGACTGTGCGTGGCTGCTGGGCTGGGCCCTGTGTGGGACAGG |
| | | GTACGCCCAGCCTGGTGCCCCACGAAGAAGCCAAGGCTCCAGGACGGACC |
| | | ACAGCCACCCCTGCTGGTGCCTCCCTGGAGTGGTCCCAGGCCCGGGGCCT |
| | | GCTCTTCTCCCCGGCTCCCCAGCCTCGGCGGCTCCTGCCCGGGCCCCAGG |
| | | AAAACTCAGTGCAGTCCAGTGCCTGTGGCAGGCAGCACCTTGAGCCAACA |
| | | GGAACCATTGACATGCGAGGCCCAGGGCAGGCAGACTGTGCAGTGGCCAT |
| | | TGGGCGGCCCCTCGGGGAGGTGGTGACCCTCCGCGTCCTTGAGAGTTCTC |
| | | TCAACTGCAGTGCGGGGGACATGTTGCTGCTTTGGGGCCGGCTCACCTGG |
| | | AGGAAGATGTGCAGGAAGCTGTTGGACATGACTTTCAGCTCCAAGACCAA |
| | | CACGCTGGTGGTGAGGCAGCGCTGCGGGCGGCCAGGAGGTGGGGTGCTGC |
| | | TGCGGTATGGGAGCCAGCTTGCTCCTGAAACCTTCTACAGAGAATGTGAC |
| | | ATGCAGCTCTTTGGGCCCTGGGGTGAAATCGTGAGCCCCTCGCTGAGTCC |
| | | AGCCACGAGTAATGCAGGGGGCTGCCGGCTCTTCATTAATGTGGCTCCGC |
| | | ACGCACGGATTGCCATCCATGCCCTGGCCACCAACATGGGCGCTGGGACC |
| | | GAGGGAGCCAATGCCAGCTACATCTTGATCCGGGACACCCACAGCTTGAG |
| | | GACCACAGCGTTCCATGGGCAGCAGGTGCTCTACTGGGAGTCAGAGAGCA |
| | | GCCAGGCTGAGATGGAGTTCAGCGAGGGCTTCCTGAAGGCTCAGGCCAGC |
| | | CTGCGGGGCCAGTACTGGACCCTCCAATCATGGGTACCGGAGATGCAGGA |
| | | CCCTCAGTCCTGGAAGGGAAAGGAAGGAACCTCTAGAGGGCCCTTCGAAC |
| | | AAAAACTCATCTCAGAAGAGGATCTGAATATGCATACCGGTCATCATCAC |
| | | CATCACCAT |
| 119 | Exemplified A11451 | ATGCACCAGCGTCACCCCCGGGCAAGATGCCCTCCCCTCTGTGTGGCCGG |
| | variant nucleotide | AATCCTTGCCTGTGGCTTTCTCCTGGGCTGCTGGGGACCCTCCCATTTCC |
| | sequence | AGCAGAGCTGTCTTCAGGCTTTGGAGCCACAGGCCGTGTCTTCTTACTTG |
| | | AGCCCTGGTGCTCCCTTAAAAGGCCGCCCTCCTTCCCCTGGCTTCCAGAG |
| | | GCAGAGGCAGAGGCAGAGGCGGGCTGCAGGCGGCATCCTACACCTGGAGC |
| | | TGCTGGTGGCCGTGGGCCCCGATGTCTTCCAGGCTCACCAGGAGGACACA |
| | | GAGCGCTATGTGCTCACCAACCTCAACATCGGGGCAGAACTGCTTCGGGA |
| | | CCCGTCCCTGGGGGCTCAGTTTCGGGTGCACCTGGTGAAGATGGTCATTC |
| | | TGACAGAGCCTGAGGGTGCTCCAAATATCACAGCCAACCTCACCTCGTCC |
| | | CTGCTGAGCGTCTGTGGGTGGAGCCAGACCATCAACCCTGAGGACGACAC |
| | | GGATCCTGGCCATGCTGACCTGGTCCTCTATATCACTAGGTTTGACCTGG |
| | | AGTTGCCTGATGGTAACCGGCAGGTGCGGGGCGTCACCCAGCTGGGGGGT |
| | | GCCTGCTCCCCAACCTGGAGCTGCCTCATTACCGAGGACACTGGCTTCGA |
| | | CCTGGGAGTCACCATTGCCCATGAGATTGGGCACAGCTTCGGCCTGGAGC |
| | | ACGACGGCGCGCCCGGCAGCGGCTGCGGCCCCAGCGGACACGTGATGGCT |
| | | TCGGACGGCGCCGCGCCCCGCGCCGGCCTCGCCTGGTCCCCCTGCAGCCG |
| | | CCGGCAGCTGCTGAGCCTGCTCAGCGCAGGACGGGCGCGCTGCGTGTGGG |
| | | ACCCGCCGCGGCCTCAACCCGGGTCCGCGGGGCACCCGCCGGATGCGCAG |
| | | CCTGGCCTCTACTACAGCGCCAACGAGCAGTGCCGCGTGGCCTTCGGCCC |
| | | CAAGGCTGTCGCCTGCACCTTCGCCAGGGAGCACCTGGATATGTGCCAGG |
| | | CCCTCTCCTGCCACACAGACCCGCTGGACCAAAGCAGCTGCAGCCGCCTC |
| | | CTCGTTCCTCTCCTGGATGGGACAGAATGTGGCGTGGAGAAGTGGTGCTC |
| | | CAAAGGTCGCTGCCGCTCCCTGGTGGAGCTGACCCCCATAGCAGCAGTGC |
| | | ATGGGCGCTGGTCTAGCTGGGGTCCCCGAAGTCCTTGCTCCCGCTCCTGC |
| | | GGAGGAGGTGTGGTCACCAGGAGGCGGCAGTGCAACAACCCCAGACCTGC |
| | | CTTTGGGGGGCGTGCATGTGTTGGTGCTGACCTCCAGGCCGAGATGTGCA |
| | | ACACTCAGGCCTGCGAGAAGACCCAGCTGGAGTTCATGTCGCAACAGTGC |
| | | GCCAGGACCGACGGCCAGCCGCTGCGCTCCTCCCCTGGGGGCGCCTCCTT |
| | | CTACCACTGGGGTGCTGCTGTACCACACAGCCAAGGGGATGCTCTGTGCA |
| | | GACACATGTGCCGGGCCATTGGCGAGAGCTTCATCATGAAGCGTGGAGAC |
| | | AGCTTCCTCGATGGGACCCGGTGTATGCCAAGTGGCCCCCGGGAGGACGG |
| | | GACCCTGAGCCTGTGTGTGTCGGGCAGCTGCAGGACATTTGGCTGTGATG |
| | | GTAGGATGGACTCCCAGCAGGTATGGGACAGGTGCCAGGTGTGTGGTGGG |
| | | GACAACAGCACGTGCAGCCCACGGAAGGGCTCTTTCACAGCTGGCAGAGC |
| | | GAGAGAATATGTCACGTTTCTGACAGTTACCCCCAACCTGACCAGTGTCT |
| | | ACATTGCCAACCACAGGCCTCTCTTCACACACTTGGCGGTGAGGATCGGA |
| | | GGGCGCTATGTCGTGGCTGGGAAGATGAGCATCTCCCCTAACACCACCTA |
| | | CCCCTCCCTCCTGGAGGATGGTCGTGTCGAGTACAGAGTGGCCCTCACCG |
| | | AGGACCGGCTGCCCCGCCTGGAGGAGATCCGCATCTGGGGACCCCTCCAG |
| | | GAAGATGCTGACATCCAGGTTTACAGGCGGTATGGCGAGGAGTATGGCAA |
| | | CCTCACCCGCCCAGACATCACCTTCACCTACTTCCAGCCTAAGCCACGGC |
| | | AGGCCTGGGTGTGGGCCGCTGTGCGTGGGCCCTGCTCGGTGAGCTGTGGG |
| | | GCAGGGCTGCGCTGGGTAAACTACAGCTGCCTGGACCAGGCCAGGAAGGA |
| | | GTTGGTGGAGACTGTCCAGTGCCAAGGGAGCCAGCAGCCACCAGCGTGGC |
| | | CAGAGGCCTGCGTGCTCGAACCCTGCCCCCCTACTGGGCGGTGGGAGACT |
| | | TCGGCCCATGCAGCGCCTCCTGTGGGGGTGGCCTGGGGGAGCGGCCAGTG |
| | | CGCTGCGTGGAGGCCCAGGGCAGCCTCCTGAAGACATTGCCCCCAGCCCG |
| | | GTGCAGAGCAGGGGCCCAGCAGCCAGCTGTGGCGCTGGAAACCTGCAACC |
| | | CCCAGCCCTGCCCTGCCAGGTGGGAGGTGTCAGAGCCCAGCTCATGCACA |
| | | TCAGCTGGTGGAGCAGGCCTGGCCTTGGAGAACGAGACCTGTGTGCCAGG |
| | | GGCAGATGGCCTGGAGGCTCCAGTGACTGAGGGGCCTGGCTCCGTAGATG |
| | | AGAAGCTGCCTGCCCCTGAGCCCTGTGTCGGGATGTCATGTCCTCCAGGC |
| | | TGGGGCCATCTGGATGCCACCTCTGCAGGGGAGAAGGCTCCCTCCCCATG |
| | | GGGCAGCATCAGGACGGGGGCTCAAGCTGCACACGTGTGGACCCCTGCGG |
| | | CAGGGTCGTGCTCCGTCTCCTGCGGGCGAGGTCTGATGGAGCTCCGTTTC |
| | | CTGTGCATGGACTCTGCCCTCAGGGTGCCTGTCCAGGAAGAGCTGTGTGG |
| | | CCTGGCAAGCAAGCCTGGGAGCCGGGGGGAGGTCTGCCAGGCTGTCCCGT |
| | | GCCCTGCTCGGTGGCAGTACAAGCTGGCGGCCTGCAGCGTGAGCTGTGGG |
| | | AGAGGGGTCGTGCGGAGGATCCTGTATTGTGCCCGGGCCCATGGGGAGGA |
| | | CGATGGTGAGGAGATCCTGTTGGACACCCAGTGCCAGGGGCTGCCTCGCC |
| | | CGGAACCCCAGGAGGCCTGCAGCCTGGAGCCCTGCCCACCTAGGTGGAAA |
| | | GTCATGTCCCTTGGCCCATGTTCGGCCAGCTGTGGCCTTGGCACTGCTAG |
| | | ACGCTCGGTGGCCTGTGTGCAGCTCGACCAAGGCCAGGACGTGGAGGTGG |
| | | ACGAGGCGGCCTGTGCGGCGCTGGTGCGGCCCGAGGCCAGTGTCCCCTGT |
| | | CTCATTGCCGACTGCACCTACCGCTGGCATGTTGGCACCTGGATGGAGTG |
| | | CTCTGTTTCCTGTGGGGATGGCATCCAGCGCCGGCGTGACACCTGCCTCG |
| | | GACCCCAGGCCCAGGCGCCTGTGCCAGCTGATTTCTGCCAGCACTTGCCC |
| | | AAGCCGGTGACTGTGCGTGGCTGCTGGGCTGGGCCCTGTGTGGGACAGGG |
| | | TACGCCCAGCCTGGTGCCCCACGAAGAAGCCATTGCTCCAGGACGGACCA |
| | | CAGCCACCCCTGCTGGTGCCTCCCTGGAGTGGTCCCAGGCCCGGGGCCTG |
| | | CTCTTCTCCCCGGCTCCCCAGCCTCGGCGGCTCCTGCCCGGGCCCCAGGA |
| | | AAACTCAGTGCAGTCCAGTGCCTGTGGCAGGCAGCACCTTGAGCCAACAG |
| | | GAACCATTGACATGCGAGGCCCAGGGCAGGCAGACTGTGCAGTGGCCATT |
| | | GGGGGGCCCCTCGGGGAGGTGGTGACCCTCCGCGTCCTTGAGAGTTCTCT |
| | | CAACTGCAGTGCGGGGGACATGTTGCTGCTTTGGGGCCGGCTCACCTGGA |
| | | GGAAGATGTGCAGGAAGCTGTTGGACATGACTTTCAGCTCCAAGACCAAC |
| | | ACGCTGGTGGTGAGGCAGCGCTGCGGGCGGCCAGGAGGTGGGGTGCTGCT |
| | | GCGGTATGGGAGCCAGCTTGCTCCTGAAACCTTCTACAGAGAATGTGACA |
| | | TGCAGCTCTTTGGGCCCTGGGGTGAAATCGTGAGCCCCTCGCTGAGTCCA |
| | | GCCACGAGTAATGCAGGGGGCTGCCGGCTCTTCATTAATGTGGCTCCGCA |
| | | CGCACGGATTGCCATCCATGCCCTGGCCACCAACATGGGCGCTGGGACCG |
| | | AGGGAGCCAATGCCAGCTACATCTTGATCCGGGACACCCACAGCTTGAGG |
| | | ACCACAGCGTTCCATGGGCAGCAGGTGCTCTACTGGGAGTCAGAGAGCAG |
| | | CCAGGCTGAGATGGAGTTCAGCGAGGGCTTCCTGAAGGCTCAGGCCAGCC |
| | | TGCGGGGCCAGTACTGGACCCTCCAATCATGGGTACCGGAGATGCAGGAC |
| | | CCTCAGTCCTGGAAGGGAAAGGAAGGAACCTCTAGAGGGCCCTTCGAACA |
| | | AAAACTCATCTCAGAAGAGGATCTGAATATGCATACCGGTCATCATCACC |
| | | ATCACCAT |
| 120 | Exemplified A1146K | ATGCACCAGCGTCACCCCCGGGCAAGATGCCCTCCCCTCTGTGTGGCCGG |
| | variant nucleotide | AATCCTTGCCTGTGGCTTTCTCCTGGGCTGCTGGGGACCCTCCCATTTCC |
| | sequence | AGCAGAGCTGTCTTCAGGCTTTGGAGCCACAGGCCGTGTCTTCTTACTTG |
| | | AGCCCTGGTGCTCCCTTAAAAGGCCGCCCTCCTTCCCCTGGCTTCCAGAG |
| | | GCAGAGGCAGAGGCAGAGGGGGGCTGCAGGCGGCATCCTACACCTGGAGC |
| | | TGCTGGTGGCCGTGGGCCCCGATGTCTTCCAGGCTCACCAGGAGGACACA |
| | | GAGCGCTATGTGCTCACCAACCTCAACATCGGGGCAGAACTGCTTCGGGA |
| | | CCCGTCCCTGGGGGCTCAGTTTCGGGTGCACCTGGTGAAGATGGTCATTC |
| | | TGACAGAGCCTGAGGGTGCTCCAAATATCACAGCCAACCTCACCTCGTCC |
| | | CTGCTGAGCGTCTGTGGGTGGAGCCAGACCATCAACCCTGAGGACGACAC |
| | | GGATCCTGGCCATGCTGACCTGGTCCTCTATATCACTAGGTTTGACCTGG |
| | | AGTTGCCTGATGGTAACCGGCAGGTGCGGGGCGTCACCCAGCTGGGCGGT |
| | | GCCTGCTCCCCAACCTGGAGCTGCCTCATTACCGAGGACACTGGCTTCGA |
| | | CCTGGGAGTCACCATTGCCCATGAGATTGGGCACAGCTTCGGCCTGGAGC |
| | | ACGACGGCGCGCCCGGCAGCGGCTGCGGCCCCAGCGGACACGTGATGGCT |
| | | TCGGACGGCGCCGCGCCCCGCGCCGGCCTCGCCTGGTCCCCCTGCAGCCG |
| | | CCGGCAGCTGCTGAGCCTGCTCAGCGCAGGACGGGCGCGCTGCGTGTGGG |
| | | ACCCGCCGCGGCCTCAACCCGGGTCCGCGGGGCACCCGCCGGATGCGCAG |
| | | CCTGGCCTCTACTACAGCGCCAACGAGCAGTGCCGCGTGGCCTTCGGCCC |
| | | CAAGGCTGTCGCCTGCACCTTCGCCAGGGAGCACCTGGATATGTGCCAGG |
| | | CCCTCTCCTGCCACACAGACCCGCTGGACCAAAGCAGCTGCAGCCGCCTC |
| | | CTCGTTCCTCTCCTGGATGGGACAGAATGTGGCGTGGAGAAGTGGTGCTC |
| | | CAAAGGTCGCTGCCGCTCCCTGGTGGAGCTGACCCCCATAGCAGCAGTGC |
| | | ATGGGCGCTGGTCTAGCTGGGGTCCCCGAAGTCCTTGCTCCCGCTCCTGC |
| | | GGAGGAGGTGTGGTCACCAGGAGGCGGCAGTGCAACAACCCCAGACCTGC |
| | | CTTTGGGGGGCGTGCATGTGTTGGTGCTGACCTCCAGGCCGAGATGTGCA |
| | | ACACTCAGGCCTGCGAGAAGACCCAGCTGGAGTTCATGTCGCAACAGTGC |
| | | GCCAGGACCGACGGCCAGCCGCTGCGCTCCTCCCCTGGGGGCGCCTCCTT |
| | | CTACCACTGGGGTGCTGCTGTACCACACAGCCAAGGGGATGCTCTGTGCA |
| | | GACACATGTGCCGGGCCATTGGCGAGAGCTTCATCATGAAGCGTGGAGAC |
| | | AGCTTCCTCGATGGGACCCGGTGTATGCCAAGTGGCCCCCGGGAGGACGG |
| | | GACCCTGAGCCTGTGTGTGTCGGGCAGCTGCAGGACATTTGGCTGTGATG |
| | | GTAGGATGGACTCCCAGCAGGTATGGGACAGGTGCCAGGTGTGTGGTGGG |
| | | GACAACAGCACGTGCAGCCCACGGAAGGGCTCTTTCACAGCTGGCAGAGC |
| | | GAGAGAATATGTCACGTTTCTGACAGTTACCCCCAACCTGACCAGTGTCT |
| | | ACATTGCCAACCACAGGCCTCTCTTCACACACTTGGCGGTGAGGATCGGA |
| | | GGGCGCTATGTCGTGGCTGGGAAGATGAGCATCTCCCCTAACACCACCTA |
| | | CCCCTCCCTCCTGGAGGATGGTCGTGTCGAGTACAGAGTGGCCCTCACCG |
| | | AGGACCGGCTGCCCCGCCTGGAGGAGATCCGCATCTGGGGACCCCTCCAG |
| | | GAAGATGCTGACATCCAGGTTTACAGGCGGTATGGCGAGGAGTATGGCAA |
| | | CCTCACCCGCCCAGACATCACCTTCACCTACTTCCAGCCTAAGCCACGGC |
| | | AGGCCTGGGTGTGGGCCGCTGTGCGTGGGCCCTGCTCGGTGAGCTGTGGG |
| | | GCAGGGCTGCGCTGGGTAAACTACAGCTGCCTGGACCAGGCCAGGAAGGA |
| | | GTTGGTGGAGACTGTCCAGTGCCAAGGGAGCCAGCAGCCACCAGCGTGGC |
| | | CAGAGGCCTGCGTGCTCGAACCCTGCCCTCCCTACTGGGCGGTGGGAGAC |
| | | TTCGGCCCATGCAGCGCCTCCTGTGGGGGTGGCCTGGGGGAGCGGCCAGT |
| | | GCGCTGCGTGGAGGCCCAGGGCAGCCTCCTGAAGACATTGCCCCCAGCCC |
| | | GGTGCAGAGCAGGGGCCCAGCAGCCAGCTGTGGCGCTGGAAACCTGCAAC |
| | | CCCCAGCCCTGCCCTGCCAGGTGGGAGGTGTCAGAGCCCAGCTCATGCAC |
| | | ATCAGCTGGTGGAGCAGGCCTGGCCTTGGAGAACGAGACCTGTGTGCCAG |
| | | GGGCAGATGGCCTGGAGGCTCCAGTGACTGAGGGGCCTGGCTCCGTAGAT |
| | | GAGAAGCTGCCTGCCCCTGAGCCCTGTGTCGGGATGTCATGTCCTCCAGG |
| | | CTGGGGCCATCTGGATGCCACCTCTGCAGGGGAGAAGGCTCCCTCCCCAT |
| | | GGGGCAGCATCAGGACGGGGGCTCAAGCTGCACACGTGTGGACCCCTGCG |
| | | GCAGGGTCGTGCTCCGTCTCCTGCGGGCGAGGTCTGATGGAGCTCCGTTT |
| | | CCTGTGCATGGACTCTGCCCTCAGGGTGCCTGTCCAGGAAGAGCTGTGTG |
| | | GCCTGGCAAGCAAGCCTGGGAGCCGGCGGGAGGTCTGCCAGGCTGTCCCG |
| | | TGCCCTGCTCGGTGGCAGTACAAGCTGGCGGCCTGCAGCGTGAGCTGTGG |
| | | GAGAGGGGTCGTGCGGAGGATCCTGTATTGTGCCCGGGCCCATGGGGAGG |
| | | ACGATGGTGAGGAGATCCTGTTGGACACCCAGTGCCAGGGGCTGCCTCGC |
| | | CCGGAACCCCAGGAGGCCTGCAGCCTGGAGCCCTGCCCACCTAGGTGGAA |
| | | AGTCATGTCCCTTGGCCCATGTTCGGCCAGCTGTGGCCTTGGCACTGCTA |
| | | GACGCTCGGTGGCCTGTGTGCAGCTCGACCAAGGCCAGGACGTGGAGGTG |
| | | GACGAGGCGGCCTGTGCGGCGCTGGTGCGGCCCGAGGCCAGTGTCCCCTG |
| | | TCTCATTGCCGACTGCACCTACCGCTGGCATGTTGGCACCTGGATGGAGT |
| | | GCTCTGTTTCCTGTGGGGATGGCATCCAGCGCCGGCGTGACACCTGCCTC |
| | | GGACCCCAGGCCCAGGCGCCTGTGCCAGCTGATTTCTGCCAGCACTTGCC |
| | | CAAGCCGGTGACTGTGCGTGGCTGCTGGGCTGGGCCCTGTGTGGGACAGG |
| | | GTACGCCCAGCCTGGTGCCCCACGAAGAAGCCGCTAAGCCAGGACGGACC |
| | | ACAGCCACCCCTGCTGGTGCCTCCCTGGAGTGGTCCCAGGCCCGGGGCCT |
| | | GCTCTTCTCCCCGGCTCCCCAGCCTCGGCGGCTCCTGCCCGGGCCCCAGG |
| | | AAAACTCAGTGCAGTCCAGTGCCTGTGGCAGGCAGCACCTTGAGCCAACA |
| | | GGAACCATTGACATGCGAGGCCCAGGGGAGGCAGACTGTGCAGTGGCCAT |
| | | TGGGGGGCCCCTCGGGGAGGTGGTGACCCTCCGCGTCCTTGAGAGTTCTC |
| | | TCAACTGCAGTGCGGGGGACATGTTGCTGCTTTGGGGCCGGCTCACCTGG |
| | | AGGAAGATGTGCAGGAAGCTGTTGGACATGACTTTCAGCTCCAAGACCAA |
| | | CACGCTGGTGGTGAGGCAGCGCTGCGGGGGGCCAGGAGGTGGGGTGCTGC |
| | | TGCGGTATGGGAGCCAGCTTGCTCCTGAAACCTTCTACAGAGAATGTGAC |
| | | ATGCAGCTCTTTGGGCCCTGGGGTGAAATCGTGAGCCCCTCGCTGAGTCC |
| | | AGCCACGAGTAATGCAGGGGGCTGCCGGCTCTTCATTAATGTGGCTCCGC |
| | | ACGCACGGATTGCCATCCATGCCCTGGCCACCAACATGGGCGCTGGGACC |
| | | GAGGGAGCCAATGCCAGCTACATCTTGATCCGGGACACCCACAGCTTGAG |
| | | GACCACAGCGTTCCATGGGCAGCAGGTGCTCTACTGGGAGTCAGAGAGCA |
| | | GCCAGGCTGAGATGGAGTTCAGCGAGGGCTTCCTGAAGGCTCAGGCCAGC |
| | | CTGCGGGGCCAGTACTGGACCCTCCAATCATGGGTACCGGAGATGCAGGA |
| | | CCCTCAGTCCTGGAAGGGAAAGGAAGGAACCTCTAGAGGGCCCTTCGAAC |
| | | AAAAACTCATCTCAGAAGAGGATCTGAATATGCATACCGGTCATCATCAC |
| | | CATCACCAT |
| 121 | Exemplified A11461 | ATGCACCAGCGTCACCCCCGGGCAAGATGCCCTCCCCTCTGTGTGGCCGG |
| | variant nucleotide | AATCCTTGCCTGTGGCTTTCTCCTGGGCTGCTGGGGACCCTCCCATTTCC |
| | sequence | AGCAGAGCTGTCTTCAGGCTTTGGAGCCACAGGCCGTGTCTTCTTACTTG |
| | | AGCCCTGGTGCTCCCTTAAAAGGCCGCCCTCCTTCCCCTGGCTTCCAGAG |
| | | GCAGAGGCAGAGGCAGAGGGGGGCTGCAGGCGGCATCCTACACCTGGAGC |
| | | TGCTGGTGGCCGTGGGCCCCGATGTCTTCCAGGCTCACCAGGAGGACACA |
| | | GAGCGCTATGTGCTCACCAACCTCAACATCGGGGCAGAACTGCTTCGGGA |
| | | CCCGTCCCTGGGGGCTCAGTTTCGGGTGCACCTGGTGAAGATGGTCATTC |
| | | TGACAGAGCCTGAGGGTGCTCCAAATATCACAGCCAACCTCACCTCGTCC |
| | | CTGCTGAGCGTCTGTGGGTGGAGCCAGACCATCAACCCTGAGGACGACAC |
| | | GGATCCTGGCCATGCTGACCTGGTCCTCTATATCACTAGGTTTGACCTGG |
| | | AGTTGCCTGATGGTAACCGGCAGGTGCGGGGCGTCACCCAGCTGGGGGGT |
| | | GCCTGCTCCCCAACCTGGAGCTGCCTCATTACCGAGGACACTGGCTTCGA |
| | | CCTGGGAGTCACCATTGCCCATGAGATTGGGCACAGCTTCGGCCTGGAGC |
| | | ACGACGGCGCGCCCGGCAGCGGCTGCGGCCCCAGCGGACACGTGATGGCT |
| | | TCGGACGGCGCCGCGCCCCGCGCCGGCCTCGCCTGGTCCCCCTGCAGCCG |
| | | CCGGCAGCTGCTGAGCCTGCTCAGCGCAGGACGGGCGCGCTGCGTGTGGG |
| | | ACCCGCCGCGGCCTCAACCCGGGTCCGCGGGGCACCCGCCGGATGCGCAG |
| | | CCTGGCCTCTACTACAGCGCCAACGAGCAGTGCCGCGTGGCCTTCGGCCC |
| | | CAAGGCTGTCGCCTGCACCTTCGCCAGGGAGCACCTGGATATGTGCCAGG |
| | | CCCTCTCCTGCCACACAGACCCGCTGGACCAAAGCAGCTGCAGCCGCCTC |
| | | CTCGTTCCTCTCCTGGATGGGACAGAATGTGGCGTGGAGAAGTGGTGCTC |
| | | CAAAGGTCGCTGCCGCTCCCTGGTGGAGCTGACCCCCATAGCAGCAGTGC |
| | | ATGGGCGCTGGTCTAGCTGGGGTCCCCGAAGTCCTTGCTCCCGCTCCTGC |
| | | GGAGGAGGTGTGGTCACCAGGAGGCGGCAGTGCAACAACCCCAGACCTGC |
| | | CTTTGGGGGGCGTGCATGTGTTGGTGCTGACCTCCAGGCCGAGATGTGCA |
| | | ACACTCAGGCCTGCGAGAAGACCCAGCTGGAGTTCATGTCGCAACAGTGG |
| | | GCCAGGACCGACGGCCAGCCGCTGCGCTCCTCCCCTGGGGGCGCCTCCTT |
| | | CTACCACTGGGGTGCTGCTGTACCACACAGCCAAGGGGATGCTCTGTGCA |
| | | GACACATGTGCCGGGCCATTGGCGAGAGCTTCATCATGAAGCGTGGAGAC |
| | | AGCTTCCTCGATGGGACCCGGTGTATGCCAAGTGGCCCCCGGGAGGACGG |
| | | GACCCTGAGCCTGTGTGTGTCGGGCAGCTGCAGGACATTTGGCTGTGATG |
| | | GTAGGATGGACTCCCAGCAGGTATGGGACAGGTGCCAGGTGTGTGGTGGG |
| | | GACAACAGCACGTGCAGCCCACGGAAGGGCTCTTTCACAGCTGGCAGAGC |
| | | GAGAGAATATGTCACGTTTCTGACAGTTACCCCCAACCTGACCAGTGTCT |
| | | ACATTGCCAACCACAGGCCTCTCTTCACACACTTGGCGGTGAGGATCGGA |
| | | GGGCGCTATGTCGTGGCTGGGAAGATGAGCATCTCCCCTAACACCACCTA |
| | | CCCCTCCCTCCTGGAGGATGGTCGTGTCGAGTACAGAGTGGCCCTCACCG |
| | | AGGACCGGCTGCCCCGCCTGGAGGAGATCCGCATCTGGGGACCCCTCCAG |
| | | GAAGATGCTGACATCCAGGTTTACAGGCGGTATGGCGAGGAGTATGGCAA |
| | | CCTCACCCGCCCAGACATCACCTTCACCTACTTCCAGCCTAAGCCACGGC |
| | | AGGCCTGGGTGTGGGCCGCTGTGCGTGGGCCCTGCTCGGTGAGGTGTGGG |
| | | GCAGGGCTGCGCTGGGTAAACTACAGCTGCCTGGACCAGGCCAGGAAGGA |
| | | GTTGGTGGAGACTGTCCAGTGCCAAGGGAGCCAGCAGCCACCAGCGTGGC |
| | | CAGAGGCCTGCGTGCTCGAACCCTGCCCTCCCTACTGGGCGGTGGGAGAC |
| | | TTCGGCCCATGCAGCGCCTCCTGTGGGGGTGGCCTGGGGGAGCGGCCAGT |
| | | GCGCTGCGTGGAGGCCCAGGGCAGCCTCCTGAAGACATTGCCCCCAGCCC |
| | | GGTGCAGAGCAGGGGCCCAGCAGCCAGCTGTGGCGCTGGAAACCTGCAAC |
| | | CCCCAGCCCTGCCCTGCCAGGTGGGAGGTGTCAGAGCCCAGCTCATGCAC |
| | | ATCAGCTGGTGGAGCAGGCCTGGCCTTGGAGAACGAGACCTGTGTGCCAG |
| | | GGGCAGATGGCCTGGAGGCTCCAGTGACTGAGGGGCCTGGCTCCGTAGAT |
| | | GAGAAGCTGCCTGCCCCTGAGCCCTGTGTCGGGATGTCATGTCCTCCAGG |
| | | CTGGGGCCATCTGGATGCCACCTCTGCAGGGGAGAAGGCTCCCTCCCCAT |
| | | GGGGCAGCATCAGGACGGGGGCTCAAGCTGCACACGTGTGGACCCCTGCG |
| | | GCAGGGTCGTGCTCCGTCTCCTGCGGGCGAGGTCTGATGGAGCTCCGTTT |
| | | CCTGTGCATGGACTCTGCCCTCAGGGTGCCTGTCCAGGAAGAGCTGTGTG |
| | | GCCTGGCAAGCAAGCCTGGGAGCCGGGGGGAGGTCTGCCAGGCTGTCCCG |
| | | TGCCCTGCTCGGTGGCAGTACAAGCTGGCGGCCTGCAGCGTGAGCTGTGG |
| | | GAGAGGGGTCGTGCGGAGGATCCTGTATTGTGCCCGGGCCCATGGGGAGG |
| | | ACGATGGTGAGGAGATCCTGTTGGACACCCAGTGCCAGGGGCTGCCTCGC |
| | | CCGGAACCCCAGGAGGCCTGCAGCCTGGAGCCCTGCCCACCTAGGTGGAA |
| | | AGTCATGTCCCTTGGCCCATGTTCGGCCAGCTGTGGCCTTGGCACTGCTA |
| | | GACGCTCGGTGGCCTGTGTGCAGCTCGACCAAGGCCAGGACGTGGAGGTG |
| | | GACGAGGCGGCCTGTGCGGCGCTGGTGCGGCCCGAGGCCAGTGTCCCCTG |
| | | TCTCATTGCCGACTGCACCTACCGCTGGCATGTTGGCACCTGGATGGAGT |
| | | GCTCTGTTTCCTGTGGGGATGGCATCCAGCGCCGGCGTGACACCTGCCTC |
| | | GGACCCCAGGCCCAGGCGCCTGTGCCAGCTGATTTCTGCCAGCACTTGCC |
| | | CAAGCCGGTGACTGTGCGTGGCTGCTGGGCTGGGCCCTGTGTGGGACAGG |
| | | GTACGCCCAGCCTGGTGCCCCACGAAGAAGCCGCTATTCCAGGACGGACC |
| | | ACAGCCACCCCTGCTGGTGCCTCCCTGGAGTGGTCCCAGGCCCGGGGCCT |
| | | GCTCTTCTCCCCGGCTCCCCAGCCTCGGGGGCTCCTGCCCGGGCCCCAGG |
| | | AAAACTCAGTGCAGTCCAGTGCCTGTGGCAGGCAGCACCTTGAGCCAACA |
| | | GGAACCATTGACATGCGAGGCCCAGGGCAGGCAGACTGTGCAGTGGCCAT |
| | | TGGGGGGCCCCTCGGGGAGGTGGTGACCCTCCGCGTCCTTGAGAGTTCTC |
| | | TCAACTGCAGTGCGGGGGACATGTTGCTGCTTTGGGGCCGGCTCACCTGG |
| | | AGGAAGATGTGCAGGAAGCTGTTGGACATGACTTTCAGCTCCAAGACCAA |
| | | CACGCTGGTGGTGAGGCAGCGCTGGGGGGGGCCAGGAGGTGGGGTGCTGC |
| | | TGCGGTATGGGAGCCAGCTTGCTCCTGAAACCTTCTACAGAGAATGTGAC |
| | | ATGCAGCTCTTTGGGCCCTGGGGTGAAATCGTGAGCCCCTCGCTGAGTCC |
| | | AGCCACGAGTAATGCAGGGGGCTGCCGGCTCTTCATTAATGTGGCTCCGC |
| | | ACGCACGGATTGCCATCCATGCCCTGGCCACCAACATGGGCGCTGGGACC |
| | | GAGGGAGCCAATGCCAGCTACATCTTGATCCGGGACACCCACAGCTTGAG |
| | | GACCACAGCGTTCCATGGGCAGCAGGTGCTCTACTGGGAGTCAGAGAGCA |
| | | GCCAGGCTGAGATGGAGTTCAGCGAGGGCTTCCTGAAGGCTCAGGCCAGC |
| | | CTGGGGGGCCAGTACTGGACCCTCCAATCATGGGTACCGGAGATGCAGGA |
| | | CCCTCAGTCCTGGAAGGGAAAGGAAGGAACCTCTAGAGGGCCCTTCGAAC |
| | | AAAAACTCATCTCAGAAGAGGATCTGAATATGCATACCGGTCATCATCAC |
| | | CATCACCAT |
| 122 | Exemplified P1147K | ATGCACCAGCGTCACCCCCGGGCAAGATGCCCTCCCCTCTGTGTGGCCGG |
| | variant nucleotide | AATCCTTGCCTGTGGCTTTCTCCTGGGCTGCTGGGGACCCTCCCATTTCC |
| | sequence | AGCAGAGCTGTCTTCAGGCTTTGGAGCCACAGGCCGTGTCTTCTTACTTG |
| | | AGCCCTGGTGCTCCCTTAAAAGGCCGCCCTCCTTCCCCTGGCTTCCAGAG |
| | | GCAGAGGCAGAGGCAGAGGGGGGCTGCAGGCGGCATCCTACACCTGGAGC |
| | | TGCTGGTGGCCGTGGGCCCCGATGTCTTCCAGGCTCACCAGGAGGACACA |
| | | GAGCGCTATGTGCTCACCAACCTCAACATCGGGGCAGAACTGCTTCGGGA |
| | | CCCGTCCCTGGGGGCTCAGTTTCGGGTGCACCTGGTGAAGATGGTCATTC |
| | | TGACAGAGCCTGAGGGTGCTCCAAATATCACAGCCAACCTCACCTCGTCC |
| | | CTGCTGAGCGTCTGTGGGTGGAGCCAGACCATCAACCCTGAGGACGACAC |
| | | GGATCCTGGCCATGCTGACCTGGTCCTCTATATCACTAGGTTTGACCTGG |
| | | AGTTGCCTGATGGTAACCGGCAGGTGCGGGGCGTCACCCAGCTGGGCGGT |
| | | GCCTGCTCCCCAACCTGGAGCTGCCTCATTACCGAGGACACTGGCTTCGA |
| | | CCTGGGAGTCACCATTGCCCATGAGATTGGGCACAGCTTCGGCCTGGAGC |
| | | ACGACGGCGCGCCCGGCAGCGGCTGCGGCCCCAGCGGACACGTGATGGCT |
| | | TCGGACGGCGCCGCGCCCCGCGCCGGCCTCGCCTGGTCCCCCTGCAGCCG |
| | | CCGGCAGCTGCTGAGCCTGCTCAGCGCAGGACGGGCGCGCTGCGTGTGGG |
| | | ACCCGCCGCGGCCTCAACCCGGGTCCGCGGGGCACCCGCCGGATGCGCAG |
| | | CCTGGCCTCTACTACAGCGCCAACGAGCAGTGCCGCGTGGCCTTCGGCCC |
| | | CAAGGCTGTCGCCTGCACCTTCGCCAGGGAGCACCTGGATATGTGCCAGG |
| | | CCCTCTCCTGCCACACAGACCCGCTGGACCAAAGCAGCTGCAGCCGCCTC |
| | | CTCGTTCCTCTCCTGGATGGGACAGAATGTGGCGTGGAGAAGTGGTGCTC |
| | | CAAAGGTCGCTGCCGCTCCCTGGTGGAGCTGACCCCCATAGCAGCAGTGC |
| | | ATGGGCGCTGGTCTAGCTGGGGTCCCCGAAGTCCTTGCTCCCGCTCCTGC |
| | | GGAGGAGGTGTGGTCACCAGGAGGCGGCAGTGCAACAACCCCAGACCTGC |
| | | CTTTGGGGGGCGTGCATGTGTTGGTGCTGACCTCCAGGCCGAGATGTGCA |
| | | ACACTCAGGCCTGCGAGAAGACCCAGCTGGAGTTCATGTCGCAACAGTGC |
| | | GCCAGGACCGACGGCCAGCCGCTGCGCTCCTCCCCTGGCGGCGCCTCCTT |
| | | CTACCACTGGGGTGCTGCTGTACCACACAGCCAAGGGGATGCTCTGTGGA |
| | | GACACATGTGCCGGGCCATTGGCGAGAGCTTCATCATGAAGCGTGGAGAC |
| | | AGCTTCCTCGATGGGACCCGGTGTATGCCAAGTGGCCCCCGGGAGGACGG |
| | | GACCCTGAGCCTGTGTGTGTCGGGCAGCTGCAGGACATTTGGCTGTGATG |
| | | GTAGGATGGACTCCCAGCAGGTATGGGACAGGTGCCAGGTGTGTGGTGGG |
| | | GACAACAGCACGTGCAGCCCACGGAAGGGCTCTTTCACAGCTGGCAGAGC |
| | | GAGAGAATATGTCACGTTTCTGACAGTTACCCCCAACCTGACCAGTGTCT |
| | | ACATTGCCAACCACAGGCCTCTCTTCACACACTTGGCGGTGAGGATCGGA |
| | | GGGCGCTATGTCGTGGCTGGGAAGATGAGCATCTCCCCTAACACCACCTA |
| | | CCCCTCCCTCCTGGAGGATGGTCGTGTCGAGTACAGAGTGGCCCTCACCG |
| | | AGGACCGGCTGCCCCGCCTGGAGGAGATCCGCATCTGGGGACCCCTCCAG |
| | | GAAGATGCTGACATCCAGGTTTACAGGCGGTATGGCGAGGAGTATGGCAA |
| | | CCTCACCCGCCCAGACATCACCTTCACCTACTTCCAGCCTAAGCCACGGC |
| | | AGGCCTGGGTGTGGGCCGCTGTGCGTGGGCCCTGCTCGGTGAGCTGTGGG |
| | | GCAGGGCTGCGCTGGGTAAACTACAGCTGCCTGGACCAGGCCAGGAAGGA |
| | | GTTGGTGGAGACTGTCCAGTGCCAAGGGAGCCAGCAGCCACCAGCGTGGC |
| | | CAGAGGCCTGCGTGCTCGAACCCTGCCCTCCCTACTGGGCGGTGGGAGAC |
| | | TTCGGCCCATGCAGCGCCTCCTGTGGGGGTGGCCTGGGGGAGCGGCCAGT |
| | | GCGCTGCGTGGAGGCCCAGGGCAGCCTCCTGAAGACATTGCCCCCAGCCC |
| | | GGTGCAGAGCAGGGGCCCAGCAGCCAGCTGTGGCGCTGGAAACCTGCAAC |
| | | CCCCAGCCCTGCCCTGCCAGGTGGGAGGTGTCAGAGCCCAGCTCATGCAC |
| | | ATCAGCTGGTGGAGCAGGCCTGGCCTTGGAGAACGAGACCTGTGTGCCAG |
| | | GGGCAGATGGCCTGGAGGCTCCAGTGACTGAGGGGCCTGGCTCCGTAGAT |
| | | GAGAAGCTGCCTGCCCCTGAGCCCTGTGTCGGGATGTCATGTCCTCCAGG |
| | | CTGGGGCCATCTGGATGCCACCTCTGCAGGGGAGAAGGCTCCCTCCCCAT |
| | | GGGGCAGCATCAGGACGGGGGCTCAAGCTGCACACGTGTGGACCCCTGCG |
| | | GCAGGGTCGTGCTCCGTCTCCTGCGGGCGAGGTCTGATGGAGCTCCGTTT |
| | | CCTGTGCATGGACTCTGCCCTCAGGGTGCCTGTCCAGGAAGAGCTGTGTG |
| | | GCCTGGCAAGCAAGCCTGGGAGCCGGCGGGAGGTCTGCCAGGCTGTCCCG |
| | | TGCCCTGCTCGGTGGCAGTACAAGCTGGCGGCCTGCAGCGTGAGCTGTGG |
| | | GAGAGGGGTCGTGCGGAGGATCCTGTATTGTGCCCGGGCCCATGGGGAGG |
| | | ACGATGGTGAGGAGATCCTGTTGGACACCCAGTGCCAGGGGCTGCCTCGC |
| | | CCGGAACCCCAGGAGGCCTGCAGCCTGGAGCCCTGCCCACCTAGGTGGAA |
| | | AGTCATGTCCCTTGGCCCATGTTCGGCCAGCTGTGGCCTTGGCACTGCTA |
| | | GACGCTCGGTGGCCTGTGTGCAGCTCGACCAAGGCCAGGACGTGGAGGTG |
| | | GACGAGGCGGCCTGTGCGGCGCTGGTGCGGCCCGAGGCCAGTGTCCCCTG |
| | | TCTCATTGCCGACTGCACCTACCGCTGGCATGTTGGCACCTGGATGGAGT |
| | | GCTCTGTTTCCTGTGGGGATGGCATCCAGCGCCGGCGTGACACCTGCCTC |
| | | GGACCCCAGGCCCAGGCGCCTGTGCCAGCTGATTTCTGCCAGCACTTGCC |
| | | CAAGCCGGTGACTGTGCGTGGCTGCTGGGCTGGGCCCTGTGTGGGACAGG |
| | | GTACGCCCAGCCTGGTGCCCCACGAAGAAGCCGCTGCTAAGGGACGGACC |
| | | ACAGCCACCCCTGCTGGTGCCTCCCTGGAGTGGTCCCAGGCCCGGGGCCT |
| | | GCTCTTCTCCCCGGCTCCCCAGCCTCGGCGGCTCCTGCCCGGGCCCCAGG |
| | | AAAACTCAGTGCAGTCCAGTGCCTGTGGCAGGCAGCACCTTGAGCCAACA |
| | | GGAACCATTGACATGCGAGGCCCAGGGGAGGCAGACTGTGCAGTGGCCAT |
| | | TGGGGGGCCCCTCGGGGAGGTGGTGACCCTCCGCGTCCTTGAGAGTTCTC |
| | | TCAACTGCAGTGCGGGGGACATGTTGCTGCTTTGGGGCCGGCTCACCTGG |
| | | AGGAAGATGTGCAGGAAGCTGTTGGACATGACTTTCAGCTCCAAGACCAA |
| | | CACGCTGGTGGTGAGGCAGCGCTGCGGGGGGCCAGGAGGTGGGGTGCTGC |
| | | TGCGGTATGGGAGCCAGCTTGCTCCTGAAACCTTCTACAGAGAATGTGAC |
| | | ATGCAGCTCTTTGGGCCCTGGGGTGAAATCGTGAGCCCCTCGCTGAGTCC |
| | | AGCCACGAGTAATGCAGGGGGCTGCCGGCTCTTCATTAATGTGGCTCCGC |
| | | ACGCACGGATTGCCATCCATGCCCTGGCCACCAACATGGGCGCTGGGACC |
| | | GAGGGAGCCAATGCCAGCTACATCTTGATCCGGGACACCCACAGCTTGAG |
| | | GACCACAGCGTTCCATGGGCAGCAGGTGCTCTACTGGGAGTCAGAGAGCA |
| | | GCCAGGCTGAGATGGAGTTCAGCGAGGGCTTCCTGAAGGCTCAGGCCAGC |
| | | CTGCGGGGCCAGTACTGGACCCTCCAATCATGGGTACCGGAGATGCAGGA |
| | | CCCTCAGTCCTGGAAGGGAAAGGAAGGAACCTCTAGAGGGCCCTTCGAAC |
| | | AAAAACTCATCTCAGAAGAGGATCTGAATATGCATACCGGTCATCATCAC |
| | | CATCACCAT |
| 123 | Exemplified P11471 | ATGCACCAGCGTCACCCCCGGGCAAGATGCCCTCCCCTCTGTGTGGCCGG |
| | variant nucleotide | AATCCTTGCCTGTGGCTTTCTCCTGGGCTGCTGGGGACCCTCCCATTTCC |
| | sequence | AGCAGAGGTGTCTTCAGGCTTTGGAGCCACAGGCCGTGTCTTCTTACTTG |
| | | AGCCCTGGTGCTCCCTTAAAAGGCCGCCCTCCTTCCCCTGGCTTCCAGAG |
| | | GCAGAGGCAGAGGCAGAGGGGGGCTGCAGGCGGCATCCTACACCTGGAGC |
| | | TGCTGGTGGCCGTGGGCCCCGATGTCTTCCAGGCTCACCAGGAGGACACA |
| | | GAGCGCTATGTGCTCACCAACCTCAACATCGGGGCAGAACTGCTTCGGGA |
| | | CCCGTCCCTGGGGGCTCAGTTTCGGGTGCACCTGGTGAAGATGGTCATTC |
| | | TGACAGAGCCTGAGGGTGCTCCAAATATCACAGCCAACCTCACCTCGTCC |
| | | CTGCTGAGCGTCTGTGGGTGGAGCCAGACCATCAACCCTGAGGACGACAC |
| | | GGATCCTGGCCATGCTGACCTGGTCCTCTATATCACTAGGTTTGACCTGG |
| | | AGTTGCCTGATGGTAACCGGCAGGTGCGGGGCGTCACCCAGCTGGGCGGT |
| | | GCCTGCTCCCCAACCTGGAGCTGCCTCATTACCGAGGACACTGGCTTCGA |
| | | CCTGGGAGTCACCATTGCCCATGAGATTGGGCACAGCTTCGGCCTGGAGC |
| | | ACGACGGCGCGCCCGGCAGCGGCTGCGGCCCCAGCGGACACGTGATGGCT |
| | | TCGGACGGCGCCGCGCCCCGCGCCGGCCTCGCCTGGTCCCCCTGCAGCCG |
| | | CCGGCAGCTGCTGAGCCTGCTCAGCGCAGGACGGGCGCGCTGCGTGTGGG |
| | | ACCCGCCGCGGCCTCAACCCGGGTCCGCGGGGCACCCGCCGGATGCGCAG |
| | | CCTGGCCTCTACTACAGCGCCAACGAGCAGTGCCGCGTGGCCTTCGGCCC |
| | | CAAGGCTGTCGCCTGCACCTTCGCCAGGGAGCACCTGGATATGTGCCAGG |
| | | CCCTCTCCTGCCACACAGACCCGCTGGACCAAAGCAGCTGCAGCCGCCTC |
| | | CTCGTTCCTCTCCTGGATGGGACAGAATGTGGCGTGGAGAAGTGGTGCTC |
| | | CAAAGGTCGCTGCCGCTCCCTGGTGGAGCTGACCCCCATAGCAGCAGTGC |
| | | ATGGGCGCTGGTCTAGCTGGGGTCCCCGAAGTCCTTGCTCCCGCTCCTGC |
| | | GGAGGAGGTGTGGTCACCAGGAGGCGGCAGTGCAACAACCCCAGACCTGC |
| | | CTTTGGGGGGCGTGCATGTGTTGGTGCTGACCTCCAGGCCGAGATGTGCA |
| | | ACACTCAGGCCTGCGAGAAGACCCAGCTGGAGTTCATGTCGCAACAGTGC |
| | | GCCAGGACCGACGGCCAGCCGCTGCGCTCCTCCCCTGGCGGCGCCTCCTT |
| | | CTACCACTGGGGTGCTGCTGTACCACACAGCCAAGGGGATGCTCTGTGCA |
| | | GACACATGTGCCGGGCCATTGGCGAGAGCTTCATCATGAAGCGTGGAGAC |
| | | AGCTTCCTCGATGGGACCCGGTGTATGCCAAGTGGCCCCCGGGAGGACGG |
| | | GACCCTGAGCCTGTGTGTGTCGGGCAGCTGCAGGACATTTGGCTGTGATG |
| | | GTAGGATGGACTCCCAGCAGGTATGGGACAGGTGCCAGGTGTGTGGTGGG |
| | | GACAACAGCACGTGCAGCCCACGGAAGGGCTCTTTCACAGCTGGCAGAGC |
| | | GAGAGAATATGTCACGTTTCTGACAGTTACCCCCAACCTGACCAGTGTCT |
| | | ACATTGCCAACCACAGGCCTCTCTTCACACACTTGGCGGTGAGGATCGGA |
| | | GGGCGCTATGTCGTGGCTGGGAAGATGAGCATCTCCCCTAACACCACCTA |
| | | CCCCTCCCTCCTGGAGGATGGTCGTGTCGAGTACAGAGTGGCCCTCACCG |
| | | AGGACCGGCTGCCCCGCCTGGAGGAGATCCGCATCTGGGGACCCCTCCAG |
| | | GAAGATGCTGACATCCAGGTTTACAGGCGGTATGGCGAGGAGTATGGCAA |
| | | CCTCACCCGCCCAGACATCACCTTCACCTACTTCCAGCCTAAGCCACGGC |
| | | AGGCCTGGGTGTGGGCCGCTGTGCGTGGGCCCTGCTCGGTGAGCTGTGGG |
| | | GCAGGGCTGCGCTGGGTAAACTACAGCTGCCTGGACCAGGCCAGGAAGGA |
| | | GTTGGTGGAGACTGTCCAGTGCCAAGGGAGCCAGCAGCCACCAGCGTGGC |
| | | CAGAGGCCTGCGTGCTCGAACCCTGCCCTCCCTACTGGGCGGTGGGAGAC |
| | | TTCGGCCCATGCAGCGCCTCCTGTGGGGGTGGCCTGCGGGAGCGGCCAGT |
| | | GCGCTGCGTGGAGGCCCAGGGCAGCCTCCTGAAGACATTGCCCCCAGCCC |
| | | GGTGCAGAGCAGGGGCCCAGCAGCCAGCTGTGGCGCTGGAAACCTGCAAC |
| | | CCCCAGCCCTGCCCTGCCAGGTGGGAGGTGTCAGAGCCCAGCTCATGCAC |
| | | ATCAGCTGGTGGAGCAGGCCTGGCCTTGGAGAACGAGACCTGTGTGCCAG |
| | | GGGCAGATGGCCTGGAGGCTCCAGTGACTGAGGGGCCTGGCTCCGTAGAT |
| | | GAGAAGCTGCCTGCCCCTGAGCCCTGTGTCGGGATGTCATGTCCTCCAGG |
| | | CTGGGGCCATCTGGATGCCACCTCTGCAGGGGAGAAGGCTCCCTCCCCAT |
| | | GGGGCAGCATCAGGACGGGGGCTCAAGCTGCACACGTGTGGACCCCTGCG |
| | | GCAGGGTCGTGCTCCGTCTCCTGCGGGCGAGGTCTGATGGAGCTCCGTTT |
| | | CCTGTGCATGGACTCTGCCCTCAGGGTGCCTGTCCAGGAAGAGCTGTGTG |
| | | GCCTGGCAAGCAAGCCTGGGAGCCGGCGGGAGGTCTGCCAGGCTGTCCCG |
| | | TGCCCTGCTCGGTGGCAGTACAAGCTGGCGGCCTGCAGCGTGAGCTGTGG |
| | | GAGAGGGGTCGTGCGGAGGATCCTGTATTGTGCCCGGGCCCATGGGGAGG |
| | | ACGATGGTGAGGAGATCCTGTTGGACACCCAGTGCCAGGGGCTGCCTCGC |
| | | CCGGAACCCCAGGAGGCCTGCAGCCTGGAGCCCTGCCCACCTAGGTGGAA |
| | | AGTCATGTCCCTTGGCCCATGTTCGGCCAGCTGTGGCCTTGGCACTGCTA |
| | | GACGCTCGGTGGCCTGTGTGCAGCTCGACCAAGGCCAGGACGTGGAGGTG |
| | | GACGAGGCGGCCTGTGCGGCGCTGGTGCGGCCCGAGGCCAGTGTCCCCTG |
| | | TCTCATTGCCGACTGCACCTACCGCTGGCATGTTGGCACCTGGATGGAGT |
| | | GCTCTGTTTCCTGTGGGGATGGCATCCAGCGCCGGCGTGACACCTGCCTC |
| | | GGACCCCAGGCCCAGGCGCCTGTGCCAGCTGATTTCTGCCAGCACTTGCC |
| | | CAAGCCGGTGACTGTGCGTGGCTGCTGGGCTGGGCCCTGTGTGGGACAGG |
| | | GTACGCCCAGCCTGGTGCCCCACGAAGAAGCCGCTGCTATTGGACGGACC |
| | | ACAGCCACCCCTGCTGGTGCCTCCCTGGAGTGGTCCCAGGCCCGGGGCCT |
| | | GCTCTTCTCCCCGGCTCCCCAGCCTCGGCGGCTCCTGCCCGGGCCCCAGG |
| | | AAAACTCAGTGCAGTCCAGTGCCTGTGGCAGGCAGCACCTTGAGCCAACA |
| | | GGAACCATTGACATGCGAGGCCCAGGGCAGGCAGACTGTGCAGTGGCCAT |
| | | TGGGCGGCCCCTCGGGGAGGTGGTGACCCTCCGCGTCCTTGAGAGTTCTC |
| | | TCAACTGCAGTGCGGGGGACATGTTGCTGCTTTGGGGCCGGCTCACCTGG |
| | | AGGAAGATGTGCAGGAAGCTGTTGGACATGACTTTCAGCTCCAAGACCAA |
| | | CACGCTGGTGGTGAGGCAGCGCTGCGGGCGGCCAGGAGGTGGGGTGCTGC |
| | | TGCGGTATGGGAGCCAGCTTGCTCCTGAAACCTTCTACAGAGAATGTGAC |
| | | ATGCAGCTCTTTGGGCCCTGGGGTGAAATCGTGAGCCCCTCGCTGAGTCC |
| | | AGCCACGAGTAATGCAGGGGGCTGCCGGCTCTTCATTAATGTGGCTCCGC |
| | | ACGCACGGATTGCCATCCATGCCCTGGCCACCAACATGGGCGCTGGGACC |
| | | GAGGGAGCCAATGCCAGCTACATCTTGATCCGGGACACCCACAGCTTGAG |
| | | GACCACAGCGTTCCATGGGCAGCAGGTGCTCTACTGGGAGTCAGAGAGCA |
| | | GCCAGGCTGAGATGGAGTTCAGCGAGGGCTTCCTGAAGGCTCAGGCCAGC |
| | | CTGCGGGGCCAGTACTGGACCCTCCAATCATGGGTACCGGAGATGCAGGA |
| | | CCCTCAGTCCTGGAAGGGAAAGGAAGGAACCTCTAGAGGGCCCTTCGAAC |
| | | AAAAACTCATCTCAGAAGAGGATCTGAATATGCATACCGGTCATCATCAC |
| | | CATCACCAT |
| 124 | Exemplified P1154K | ATGCACCAGCGTCACCCCCGGGCAAGATGCCCTCCCCTCTGTGTGGCCGG |
| | variant nucleotide | AATCCTTGCCTGTGGCTTTCTCCTGGGCTGCTGGGGACCCTCCCATTTCC |
| | sequence | AGCAGAGCTGTCTTCAGGCTTTGGAGCCACAGGCCGTGTCTTCTTACTTG |
| | | AGCCCTGGTGCTCCCTTAAAAGGCCGCCCTCCTTCCCCTGGCTTCCAGAG |
| | | GCAGAGGCAGAGGCAGAGGGGGGCTGCAGGCGGCATCCTACACCTGGAGC |
| | | TGCTGGTGGCCGTGGGCCCCGATGTCTTCCAGGCTCACCAGGAGGACACA |
| | | GAGCGCTATGTGCTCACCAACCTCAACATCGGGGCAGAACTGCTTCGGGA |
| | | CCCGTCCCTGGGGGCTCAGTTTCGGGTGCACCTGGTGAAGATGGTCATTC |
| | | TGACAGAGCCTGAGGGTGCTCCAAATATCACAGCCAACCTCACCTCGTCC |
| | | CTGCTGAGCGTCTGTGGGTGGAGCCAGACCATCAACCCTGAGGACGACAC |
| | | GGATCCTGGCCATGCTGACCTGGTCCTCTATATCACTAGGTTTGACCTGG |
| | | AGTTGCCTGATGGTAACCGGCAGGTGCGGGGCGTCACCCAGCTGGGGGGT |
| | | GCCTGCTCCCCAACCTGGAGCTGCCTCATTACCGAGGACACTGGCTTCGA |
| | | CCTGGGAGTCACCATTGCCCATGAGATTGGGCACAGCTTCGGCCTGGAGC |
| | | ACGACGGCGCGCCCGGCAGCGGCTGCGGCCCCAGCGGACACGTGATGGCT |
| | | TCGGACGGCGCCGCGCCCCGCGCCGGCCTCGCCTGGTCCCCCTGCAGCCG |
| | | CCGGCAGCTGCTGAGCCTGCTCAGCGCAGGACGGGCGCGCTGCGTGTGGG |
| | | ACCCGCCGCGGCCTCAACCCGGGTCCGCGGGGCACCCGCCGGATGCGCAG |
| | | CCTGGCCTCTACTACAGCGCCAACGAGCAGTGCCGCGTGGCCTTCGGCCC |
| | | CAAGGCTGTCGCCTGCACCTTCGCCAGGGAGCACCTGGATATGTGCCAGG |
| | | CCCTCTCCTGCCACACAGACCCGCTGGACCAAAGCAGCTGCAGCCGCCTC |
| | | CTCGTTCCTCTCCTGGATGGGACAGAATGTGGCGTGGAGAAGTGGTGCTC |
| | | CAAAGGTCGCTGCCGCTCCCTGGTGGAGCTGACCCCCATAGCAGCAGTGC |
| | | ATGGGCGCTGGTCTAGCTGGGGTCCCCGAAGTCCTTGCTCCCGCTCCTGC |
| | | GGAGGAGGTGTGGTCACCAGGAGGCGGCAGTGCAACAACCCCAGACCTGC |
| | | CTTTGGGGGGCGTGCATGTGTTGGTGCTGACCTCCAGGCCGAGATGTGCA |
| | | ACACTCAGGCCTGCGAGAAGACCCAGCTGGAGTTCATGTCGCAACAGTGC |
| | | GCCAGGACCGACGGCCAGCCGCTGCGCTCCTCCCCTGGCGGCGCCTCCTT |
| | | CTACCACTGGGGTGCTGCTGTACCACACAGCCAAGGGGATGCTCTGTGCA |
| | | GACACATGTGCCGGGCCATTGGCGAGAGCTTCATCATGAAGCGTGGAGAC |
| | | AGCTTCCTCGATGGGACCCGGTGTATGCCAAGTGGCCCCCGGGAGGACGG |
| | | GACCCTGAGCCTGTGTGTGTCGGGCAGCTGCAGGACATTTGGCTGTGATG |
| | | GTAGGATGGACTCCCAGCAGGTATGGGACAGGTGCCAGGTGTGTGGTGGG |
| | | GACAACAGCACGTGCAGCCCACGGAAGGGCTCTTTCACAGCTGGCAGAGC |
| | | GAGAGAATATGTCACGTTTCTGACAGTTACCCCCAACCTGACCAGTGTCT |
| | | ACATTGCCAACCACAGGCCTCTCTTCACACACTTGGCGGTGAGGATCGGA |
| | | GGGCGCTATGTCGTGGCTGGGAAGATGAGCATCTCCCCTAACACCACCTA |
| | | CCCCTCCCTCCTGGAGGATGGTCGTGTCGAGTACAGAGTGGCCCTCACCG |
| | | AGGACCGGCTGCCCCGCCTGGAGGAGATCCGCATCTGGGGACCCCTCCAG |
| | | GAAGATGCTGACATCCAGGTTTACAGGCGGTATGGCGAGGAGTATGGCAA |
| | | CCTCACCCGCCCAGACATCACCTTCACCTACTTCCAGCCTAAGCCACGGC |
| | | AGGCCTGGGTGTGGGCCGCTGTGCGTGGGCCCTGCTCGGTGAGCTGTGGG |
| | | GCAGGGCTGCGCTGGGTAAACTACAGCTGCCTGGACCAGGCCAGGAAGGA |
| | | GTTGGTGGAGACTGTCCAGTGCCAAGGGAGCCAGCAGCCACCAGCGTGGC |
| | | CAGAGGCCTGCGTGCTCGAACCCTGCCCTCCCTACTGGGCGGTGGGAGAC |
| | | TTCGGCCCATGCAGCGCCTCCTGTGGGGGTGGCCTGCGGGAGCGGCCAGT |
| | | GCGCTGCGTGGAGGCCCAGGGCAGCCTCCTGAAGACATTGCCCCCAGCCC |
| | | GGTGCAGAGCAGGGGCCCAGCAGCCAGCTGTGGCGCTGGAAACCTGCAAC |
| | | CCCCAGCCCTGCCCTGCCAGGTGGGAGGTGTCAGAGCCCAGCTCATGCAC |
| | | ATCAGCTGGTGGAGCAGGCCTGGCCTTGGAGAACGAGACCTGTGTGCCAG |
| | | GGGCAGATGGCCTGGAGGCTCCAGTGACTGAGGGGCCTGGCTCCGTAGAT |
| | | GAGAAGCTGCCTGCCCCTGAGCCCTGTGTCGGGATGTCATGTCCTCCAGG |
| | | CTGGGGCCATCTGGATGCCACCTCTGCAGGGGAGAAGGCTCC |
| | | CTCCCCATGGGGCAGCATCAGGACGGGGGCTCAAGCTGCACACGTGTGGA |
| | | CCCCTGCGGCAGGGTCGTGCTCCGTCTCCTGCGGGCGAGGTCTGATGGAG |
| | | CTCCGTTTCCTGTGCATGGACTCTGCCCTCAGGGTGCCTGTCCAGGAAGA |
| | | GCTGTGTGGCCTGGCAAGCAAGCCTGGGAGCCGGGGGGAGGTCTGCCAGG |
| | | CTGTCCCGTGCCCTGCTCGGTGGCAGTACAAGCTGGCGGCCTGCAGCGTG |
| | | AGCTGTGGGAGAGGGGTCGTGCGGAGGATCCTGTATTGTGCCCGGGCCCA |
| | | TGGGGAGGACGATGGTGAGGAGATCCTGTTGGACACCCAGTGCCAGGGGC |
| | | TGCCTCGCCCGGAACCCCAGGAGGCCTGCAGCCTGGAGCCCTGCCCACCT |
| | | AGGTGGAAAGTCATGTCCCTTGGCCCATGTTCGGCCAGCTGTGGCCTTGG |
| | | CACTGCTAGACGCTCGGTGGCCTGTGTGCAGCTCGACCAAGGCCAGGACG |
| | | TGGAGGTGGACGAGGCGGCCTGTGCGGCGCTGGTGCGGCCCGAGGCCAGT |
| | | GTCCCCTGTCTCATTGCCGACTGCACCTACCGCTGGCATGTTGGCACCTG |
| | | GATGGAGTGCTCTGTTTCCTGTGGGGATGGCATCCAGCGCCGGCGTGACA |
| | | CCTGCCTCGGACCCCAGGCCCAGGCGCCTGTGCCAGCTGATTTCTGCCAG |
| | | CACTTGCCCAAGCCGGTGACTGTGCGTGGCTGCTGGGCTGGGCCCTGTGT |
| | | GGGACAGGGTACGCCCAGCCTGGTGCCCCACGAAGAAGCCGCTGCTCCAG |
| | | GACGGACCACAGCCACCAAGGCTGGTGCCTCCCTGGAGTGGTCCCAGGCC |
| | | CGGGGCCTGCTCTTCTCCCCGGCTCCCCAGCCTCGGGGGCTCCTGCCCGG |
| | | GCCCCAGGAAAACTCAGTGCAGTCCAGTGCCTGTGGCAGGCAGCACCTTG |
| | | AGCCAACAGGAACCATTGACATGCGAGGCCCAGGGCAGGCAGACTGTGCA |
| | | GTGGCCATTGGGCGGCCCCTCGGGGAGGTGGTGACCCTCCGCGTCCTTGA |
| | | GAGTTCTCTCAACTGCAGTGCGGGGGACATGTTGCTGCTTTGGGGCCGGC |
| | | TCACCTGGAGGAAGATGTGCAGGAAGCTGTTGGACATGACTTTCAGCTCC |
| | | AAGACCAACACGCTGGTGGTGAGGCAGCGCTGCGGGCGGCCAGGAGGTGG |
| | | GGTGCTGCTGCGGTATGGGAGCCAGCTTGCTCCTGAAACCTTCTACAGAG |
| | | AATGTGACATGCAGCTCTTTGGGCCCTGGGGTGAAATCGTGAGCCCCTCG |
| | | CTGAGTCCAGCCACGAGTAATGCAGGGGGCTGCCGGCTCTTCATTAATGT |
| | | GGCTCCGCACGCACGGATTGCCATCCATGCCCTGGCCACCAACATGGGCG |
| | | CTGGGACCGAGGGAGCCAATGCCAGCTACATCTTGATCCGGGACACCCAC |
| | | AGCTTGAGGACCACAGCGTTCCATGGGCAGCAGGTGCTCTACTGGGAGTC |
| | | AGAGAGCAGCCAGGCTGAGATGGAGTTCAGCGAGGGCTTCCTGAAGGCTC |
| | | AGGCCAGCCTGCGGGGCCAGTACTGGACCCTCCAATCATGGGTACCGGAG |
| | | ATGCAGGACCCTCAGTCCTGGAAGGGAAAGGAAGGAACCTCTAGAGGGCC |
| | | CTTCGAACAAAAACTCATCTCAGAAGAGGATCTGAATATGCATACCGGTC |
| | | ATCATCACCATCACCAT |
| 125 | Exemplified P11541 | ATGCACCAGCGTCACCCCCGGGCAAGATGCCCTCCCCTCTGTGTGGCCGG |
| | variant nucleotide | AATCCTTGCCTGTGGCTTTCTCCTGGGCTGCTGGGGACCCTCCCATTTCC |
| | sequence | AGCAGAGCTGTCTTCAGGCTTTGGAGCCACAGGCCGTGTCTTCTTACTTG |
| | | AGCCCTGGTGCTCCCTTAAAAGGCCGCCCTCCTTCCCCTGGCTTCCAGAG |
| | | GCAGAGGCAGAGGCAGAGGCGGGCTGCAGGCGGCATCCTACACCTGGAGC |
| | | TGCTGGTGGCCGTGGGCCCCGATGTCTTCCAGGCTCACCAGGAGGACACA |
| | | GAGCGCTATGTGCTCACCAACCTCAACATCGGGGCAGAACTGCTTCGGGA |
| | | CCCGTCCCTGGGGGCTCAGTTTCGGGTGCACCTGGTGAAGATGGTCATTC |
| | | TGACAGAGCCTGAGGGTGCTCCAAATATCACAGCCAACCTCACCTCGTCC |
| | | CTGCTGAGCGTCTGTGGGTGGAGCCAGACCATCAACCCTGAGGACGACAC |
| | | GGATCCTGGCCATGCTGACCTGGTCCTCTATATCACTAGGTTTGACCTGG |
| | | AGTTGCCTGATGGTAACCGGCAGGTGCGGGGCGTCACCCAGCTGGGCGGT |
| | | GCCTGCTCCCCAACCTGGAGCTGCCTCATTACCGAGGACACTGGCTTCGA |
| | | CCTGGGAGTCACCATTGCCCATGAGATTGGGCACAGCTTCGGCCTGGAGC |
| | | ACGACGGCGCGCCCGGCAGCGGCTGCGGCCCCAGCGGACACGTGATGGCT |
| | | TCGGACGGCGCCGCGCCCCGCGCCGGCCTCGCCTGGTCCCCCTGCAGCCG |
| | | CCGGCAGCTGCTGAGCCTGCTCAGCGCAGGACGGGCGCGCTGCGTGTGGG |
| | | ACCCGCCGCGGCCTCAACCCGGGTCCGCGGGGCACCCGCCGGATGCGCAG |
| | | CCTGGCCTCTACTACAGCGCCAACGAGCAGTGCCGCGTGGCCTTCGGCCC |
| | | CAAGGCTGTCGCCTGCACCTTCGCCAGGGAGCACCTGGATATGTGCCAGG |
| | | CCCTCTCCTGCCACACAGACCCGCTGGACCAAAGCAGCTGCAGCCGCCTC |
| | | CTCGTTCCTCTCCTGGATGGGACAGAATGTGGCGTGGAGAAGTGGTGCTC |
| | | CAAAGGTCGCTGCCGCTCCCTGGTGGAGCTGACCCCCATAGCAGCAGTGC |
| | | ATGGGCGCTGGTCTAGCTGGGGTCCCCGAAGTCCTTGCTCCCGCTCCTGC |
| | | GGAGGAGGTGTGGTCACCAGGAGGCGGCAGTGCAACAACCCCAGACCTGC |
| | | CTTTGGGGGGCGTGCATGTGTTGGTGCTGACCTCCAGGCCGAGATGTGCA |
| | | ACACTCAGGCCTGCGAGAAGACCCAGCTGGAGTTCATGTCGCAACAGTGC |
| | | GCCAGGACCGACGGCCAGCCGCTGCGCTCCTCCCCTGGGGGCGCCTCCTT |
| | | CTACCACTGGGGTGCTGCTGTACCACACAGCCAAGGGGATGCTCTGTGCA |
| | | GACACATGTGCCGGGCCATTGGCGAGAGCTTCATCATGAAGCGTGGAGAC |
| | | AGCTTCCTCGATGGGACCCGGTGTATGCCAAGTGGCCCCCGGGAGGACGG |
| | | GACCCTGAGCCTGTGTGTGTCGGGCAGCTGCAGGACATTTGGCTGTGATG |
| | | GTAGGATGGACTCCCAGCAGGTATGGGACAGGTGCCAGGTGTGTGGTGGG |
| | | GACAACAGCACGTGCAGCCCACGGAAGGGCTCTTTCACAGCTGGCAGAGC |
| | | GAGAGAATATGTCACGTTTCTGACAGTTACCCCCAACCTGACCAGTGTCT |
| | | ACATTGCCAACCACAGGCCTCTCTTCACACACTTGGCGGTGAGGATCGGA |
| | | GGGCGCTATGTCGTGGCTGGGAAGATGAGCATCTCCCCTAACACCACCTA |
| | | CCCCTCCCTCCTGGAGGATGGTCGTGTCGAGTACAGAGTGGCCCTCACCG |
| | | AGGACCGGCTGCCCCGCCTGGAGGAGATCCGCATCTGGGGACCCCTCCAG |
| | | GAAGATGCTGACATCCAGGTTTACAGGCGGTATGGCGAGGAGTATGGCAA |
| | | CCTCACCCGCCCAGACATCACCTTCACCTACTTCCAGCCTAAGCCACGGC |
| | | AGGCCTGGGTGTGGGCCGCTGTGCGTGGGCCCTGCTCGGTGAGCTGTGGG |
| | | GCAGGGCTGCGCTGGGTAAACTACAGCTGCCTGGACCAGGCCAGGAAGGA |
| | | GTTGGTGGAGACTGTCCAGTGCCAAGGGAGCCAGCAGCCACCAGCGTGGC |
| | | CAGAGGCCTGCGTGCTCGAACCCTGCCCTCCCTACTGGGCGGTGGGAGAC |
| | | TTCGGCCCATGCAGCGCCTCCTGTGGGGGTGGCCTGCGGGAGCGGCCAGT |
| | | GCGCTGCGTGGAGGCCCAGGGCAGCCTCCTGAAGACATTGCCCCCAGCCC |
| | | GGTGCAGAGCAGGGGCCCAGCAGCCAGCTGTGGCGCTGGAAACCTGCAAC |
| | | CCCCAGCCCTGCCCTGCCAGGTGGGAGGTGTCAGAGCCCAGCTCATGCAC |
| | | ATCAGCTGGTGGAGCAGGCCTGGCCTTGGAGAACGAGACCTGTGTGCCAG |
| | | GGGCAGATGGCCTGGAGGCTCCAGTGACTGAGGGGCCTGGCTCCGTAGAT |
| | | GAGAAGCTGCCTGCCCCTGAGCCCTGTGTCGGGATGTCATGTCCTCCAGG |
| | | CTGGGGCCATCTGGATGCCACCTCTGCAGGGGAGAAGGCTCCCTCCCCAT |
| | | GGGGCAGCATCAGGACGGGGGCTCAAGCTGCACACGTGTGGACCCCTGCG |
| | | GCAGGGTCGTGCTCCGTCTCCTGCGGGCGAGGTCTGATGGAGCTCCGTTT |
| | | CCTGTGCATGGACTCTGCCCTCAGGGTGCCTGTCCAGGAAGAGCTGTGTG |
| | | GCCTGGCAAGCAAGCCTGGGAGCCGGGGGGAGGTCTGCCAGGCTGTCCCG |
| | | TGCCCTGCTCGGTGGCAGTACAAGCTGGCGGCCTGCAGCGTGAGCTGTGG |
| | | GAGAGGGGTCGTGCGGAGGATCCTGTATTGTGCCCGGGCCCATGGGGAGG |
| | | ACGATGGTGAGGAGATCCTGTTGGACACCCAGTGCCAGGGGCTGCCTCGC |
| | | CCGGAACCCCAGGAGGCCTGCAGCCTGGAGCCCTGCCCACCTAGGTGGAA |
| | | AGTCATGTCCCTTGGCCCATGTTCGGCCAGCTGTGGCCTTGGCACTGCTA |
| | | GACGCTCGGTGGCCTGTGTGCAGCTCGACCAAGGCCAGGACGTGGAGGTG |
| | | GACGAGGCGGCCTGTGCGGCGCTGGTGCGGCCCGAGGCCAGTGTCCCCTG |
| | | TCTCATTGCCGACTGCACCTACCGCTGGCATGTTGGCACCTGGATGGAGT |
| | | GCTCTGTTTCCTGTGGGGATGGCATCCAGCGCCGGCGTGACACCTGCCTC |
| | | GGACCCCAGGCCCAGGCGCCTGTGCCAGCTGATTTCTGCCAGCACTTGCC |
| | | CAAGCCGGTGACTGTGCGTGGCTGCTGGGCTGGGCCCTGTGTGGGACAGG |
| | | GTACGCCCAGCCTGGTGCCCCACGAAGAAGCCGCTGCTCCAGGACGGACC |
| | | ACAGCCACCATTGCTGGTGCCTCCCTGGAGTGGTCCCAGGCCCGGGGCCT |
| | | GCTCTTCTCCCCGGCTCCCCAGCCTCGGCGGCTCCTGCCCGGGCCCCAGG |
| | | AAAACTCAGTGCAGTCCAGTGCCTGTGGCAGGCAGCACCTTGAGCCAACA |
| | | GGAACCATTGACATGCGAGGCCCAGGGCAGGCAGACTGTGCAGTGGCCAT |
| | | TGGGGGGCCCCTCGGGGAGGTGGTGACCCTCCGCGTCCTTGAGAGTTCTC |
| | | TCAACTGCAGTGCGGGGGACATGTTGCTGCTTTGGGGCCGGCTCACCTGG |
| | | AGGAAGATGTGCAGGAAGCTGTTGGACATGACTTTCAGCTCCAAGACCAA |
| | | CACGCTGGTGGTGAGGCAGCGCTGCGGGCGGCCAGGAGGTGGGGTGCTGC |
| | | TGCGGTATGGGAGCCAGCTTGCTCCTGAAACCTTCTACAGAGAATGTGAC |
| | | ATGCAGCTCTTTGGGCCCTGGGGTGAAATCGTGAGCCCCTCGCTGAGTCC |
| | | AGCCACGAGTAATGCAGGGGGCTGCCGGCTCTTCATTAATGTGGCTCCGC |
| | | ACGCACGGATTGCCATCCATGCCCTGGCCACCAACATGGGCGCTGGGACC |
| | | GAGGGAGCCAATGCCAGCTACATCTTGATCCGGGACACCCACAGCTTGAG |
| | | GACCACAGCGTTCCATGGGCAGCAGGTGCTCTACTGGGAGTCAGAGAGCA |
| | | GCCAGGCTGAGATGGAGTTCAGCGAGGGCTTCCTGAAGGCTCAGGCCAGC |
| | | CTGCGGGGCCAGTACTGGACCCTCCAATCATGGGTACCGGAGATGCAGGA |
| | | CCCTCAGTCCTGGAAGGGAAAGGAAGGAACCTCTAGAGGGCCCTTCGAAC |
| | | AAAAACTCATCTCAGAAGAGGATCTGAATATGCATACCGGTCATCATCAC |
| | | CATCACCAT |
| 126 | Exemplified P1171K | ATGCACCAGCGTCACCCCCGGGCAAGATGCCCTCCCCTCTGTGTGGCCGG |
| | variant nucleotide | AATCCTTGCCTGTGGCTTTCTCCTGGGCTGCTGGGGACCCTCCCATTTCC |
| | sequence | AGCAGAGCTGTCTTCAGGCTTTGGAGCCACAGGCCGTGTCTTCTTACTTG |
| | | AGCCCTGGTGCTCCCTTAAAAGGCCGCCCTCCTTCCCCTGGCTTCCAGAG |
| | | GCAGAGGCAGAGGCAGAGGCGGGCTGCAGGCGGCATCCTACACCTGGAGC |
| | | TGCTGGTGGCCGTGGGCCCCGATGTCTTCCAGGCTCACCAGGAGGACACA |
| | | GAGCGCTATGTGCTCACCAACCTCAACATCGGGGCAGAACTGCTTCGGGA |
| | | CCCGTCCCTGGGGGCTCAGTTTCGGGTGCACCTGGTGAAGATGGTCATTC |
| | | TGACAGAGCCTGAGGGTGCTCCAAATATCACAGCCAACCTCACCTCGTCC |
| | | CTGCTGAGCGTCTGTGGGTGGAGCCAGACCATCAACCCTGAGGACGACAC |
| | | GGATCCTGGCCATGCTGACCTGGTCCTCTATATCACTAGGTTTGACCTGG |
| | | AGTTGCCTGATGGTAACCGGCAGGTGCGGGGCGTCACCCAGCTGGGGGGT |
| | | GCCTGCTCCCCAACCTGGAGCTGCCTCATTACCGAGGACACTGGCTTCGA |
| | | CCTGGGAGTCACCATTGCCCATGAGATTGGGCACAGCTTCGGCCTGGAGC |
| | | ACGACGGCGCGCCCGGCAGCGGCTGCGGCCCCAGCGGACACGTGATGGCT |
| | | TCGGACGGCGCCGCGCCCCGCGCCGGCCTCGCCTGGTCCCCCTGCAGCCG |
| | | CCGGCAGCTGCTGAGCCTGCTCAGCGCAGGACGGGCGCGCTGCGTGTGGG |
| | | ACCCGCCGCGGCCTCAACCCGGGTCCGCGGGGCACCCGCCGGATGCGCAG |
| | | CCTGGCCTCTACTACAGCGCCAACGAGCAGTGCCGCGTGGCCTTCGGCCC |
| | | CAAGGCTGTCGCCTGCACCTTCGCCAGGGAGCACCTGGATATGTGCCAGG |
| | | CCCTCTCCTGCCACACAGACCCGCTGGACCAAAGCAGCTGCAGCCGCCTC |
| | | CTCGTTCCTCTCCTGGATGGGACAGAATGTGGCGTGGAGAAGTGGTGCTC |
| | | CAAAGGTCGCTGCCGCTCCCTGGTGGAGCTGACCCCCATAGCAGCAGTGC |
| | | ATGGGCGCTGGTCTAGCTGGGGTCCCCGAAGTCCTTGCTCCCGCTCCTGC |
| | | GGAGGAGGTGTGGTCACCAGGAGGCGGCAGTGCAACAACCCCAGACCTGC |
| | | CTTTGGGGGGCGTGCATGTGTTGGTGCTGACCTCCAGGCCGAGATGTGCA |
| | | ACACTCAGGCCTGCGAGAAGACCCAGCTGGAGTTCATGTCGCAACAGTGC |
| | | GCCAGGACCGACGGCCAGCCGCTGCGCTCCTCCCCTGGGGGCGCCTCCTT |
| | | CTACCACTGGGGTGCTGCTGTACCACACAGCCAAGGGGATGCTCTGTGCA |
| | | GACACATGTGCCGGGCCATTGGCGAGAGCTTCATCATGAAGCGTGGAGAC |
| | | AGCTTCCTCGATGGGACCCGGTGTATGCCAAGTGGCCCCCGGGAGGACGG |
| | | GACCCTGAGCCTGTGTGTGTCGGGCAGCTGCAGGACATTTGGCTGTGATG |
| | | GTAGGATGGACTCCCAGCAGGTATGGGACAGGTGCCAGGTGTGTGGTGGG |
| | | GACAACAGCACGTGCAGCCCACGGAAGGGCTCTTTCACAGCTGGCAGAGC |
| | | GAGAGAATATGTCACGTTTCTGACAGTTACCCCCAACCTGACCAGTGTCT |
| | | ACATTGCCAACCACAGGCCTCTCTTCACACACTTGGCGGTGAGGATCGGA |
| | | GGGCGCTATGTCGTGGCTGGGAAGATGAGCATCTCCCCTAACACCACCTA |
| | | CCCCTCCCTCCTGGAGGATGGTCGTGTCGAGTACAGAGTGGCCCTCACCG |
| | | AGGACCGGCTGCCCCGCCTGGAGGAGATCCGCATCTGGGGACCCCTCCAG |
| | | GAAGATGCTGACATCCAGGTTTACAGGCGGTATGGCGAGGAGTATGGCAA |
| | | CCTCACCCGCCCAGACATCACCTTCACCTACTTCCAGCCTAAGCCACGGC |
| | | AGGCCTGGGTGTGGGCCGCTGTGCGTGGGCCCTGCTCGGTGAGCTGTGGG |
| | | GCAGGGCTGCGCTGGGTAAACTACAGCTGCCTGGACCAGGCCAGGAAGGA |
| | | GTTGGTGGAGACTGTCCAGTGCCAAGGGAGCCAGCAGCCACCAGCGTGGC |
| | | CAGAGGCCTGCGTGCTCGAACCCTGCCCTCCCTACTGGGCGGTGGGAGAC |
| | | TTCGGCCCATGCAGCGCCTCCTGTGGGGGTGGCCTGCGGGAGCGGCCAGT |
| | | GCGCTGCGTGGAGGCCCAGGGCAGCCTCCTGAAGACATTGCCCCCAGCCC |
| | | GGTGCAGAGCAGGGGCCCAGCAGCCAGCTGTGGCGCTGGAAACCTGCAAC |
| | | CCCCAGCCCTGCCCTGCCAGGTGGGAGGTGTCAGAGCCCAGCTCATGCAC |
| | | ATCAGCTGGTGGAGCAGGCCTGGCCTTGGAGAACGAGACCTGTGTGCCAG |
| | | GGGCAGATGGCCTGGAGGCTCCAGTGACTGAGGGGCCTGGCTCCGTAGAT |
| | | GAGAAGCTGCCTGCCCCTGAGCCCTGTGTCGGGATGTCATGTCCTCCAGG |
| | | CTGGGGCCATCTGGATGCCACCTCTGCAGGGGAGAAGGCTCCCTCCCCAT |
| | | GGGGGAGCATCAGGACGGGGGCTCAAGCTGCACACGTGTGGACCCCTGCG |
| | | GCAGGGTCGTGCTCCGTCTCCTGCGGGCGAGGTCTGATGGAGCTCCGTTT |
| | | CCTGTGCATGGACTCTGCCCTCAGGGTGCCTGTCCAGGAAGAGCTGTGTG |
| | | GCCTGGCAAGCAAGCCTGGGAGCCGGGGGGAGGTCTGCCAGGCTGTCCCG |
| | | TGCCCTGCTCGGTGGCAGTACAAGCTGGCGGCCTGCAGCGTGAGCTGTGG |
| | | GAGAGGGGTCGTGCGGAGGATCCTGTATTGTGCCCGGGCCCATGGGGAGG |
| | | ACGATGGTGAGGAGATCCTGTTGGACACCCAGTGCCAGGGGCTGCCTCGC |
| | | CCGGAACCCCAGGAGGCCTGCAGCCTGGAGCCCTGCCCACCTAGGTGGAA |
| | | AGTCATGTCCCTTGGCCCATGTTCGGCCAGCTGTGGCCTTGGCACTGCTA |
| | | GACGCTCGGTGGCCTGTGTGCAGCTCGACCAAGGCCAGGACGTGGAGGTG |
| | | GACGAGGCGGCCTGTGCGGCGCTGGTGCGGCCCGAGGCCAGTGTCCCCTG |
| | | TCTCATTGCCGACTGCACCTACCGCTGGCATGTTGGCACCTGGATGGAGT |
| | | GCTCTGTTTCCTGTGGGGATGGCATCCAGCGCCGGCGTGACACCTGCCTC |
| | | GGACCCCAGGCCCAGGCGCCTGTGCCAGCTGATTTCTGCCAGCACTTGCC |
| | | CAAGCCGGTGACTGTGCGTGGCTGCTGGGCTGGGCCCTGTGTGGGACAGG |
| | | GTACGCCCAGCCTGGTGCCCCACGAAGAAGCCGCTGCTCCAGGACGGACC |
| | | ACAGCCACCCCTGCTGGTGCCTCCCTGGAGTGGTCCCAGGCCCGGGGCCT |
| | | GCTCTTCTCCAAGGCTCCCCAGCCTCGGCGGCTCCTGCCCGGGCCCCAGG |
| | | AAAACTCAGTGCAGTCCAGTGCCTGTGGCAGGCAGCACCTTGAGCCAACA |
| | | GGAACCATTGACATGCGAGGCCCAGGGCAGGCAGACTGTGCAGTGGCCAT |
| | | TGGGGGGCCCCTCGGGGAGGTGGTGACCCTCCGCGTCCTTGAGAGTTCTC |
| | | TCAACTGCAGTGCGGGGGACATGTTGCTGCTTTGGGGCCGGCTCACCTGG |
| | | AGGAAGATGTGCAGGAAGCTGTTGGACATGACTTTCAGCTCCAAGACCAA |
| | | CACGCTGGTGGTGAGGCAGCGCTGGGGGGGGCCAGGAGGTGGGGTGCTGC |
| | | TGCGGTATGGGAGCCAGCTTGCTCCTGAAACCTTCTACAGAGAATGTGAC |
| | | ATGCAGCTCTTTGGGCCCTGGGGTGAAATCGTGAGCCCCTCGCTGAGTCC |
| | | AGCCACGAGTAATGCAGGGGGCTGCCGGCTCTTCATTAATGTGGCTCCGC |
| | | ACGCACGGATTGCCATCCATGCCCTGGCCACCAACATGGGCGCTGGGACC |
| | | GAGGGAGCCAATGCCAGCTACATCTTGATCCGGGACACCCACAGCTTGAG |
| | | GACCACAGCGTTCCATGGGCAGCAGGTGCTCTACTGGGAGTCAGAGAGCA |
| | | GCCAGGCTGAGATGGAGTTCAGCGAGGGCTTCCTGAAGGCTCAGGCCAGC |
| | | CTGCGGGGCCAGTACTGGACCCTCCAATCATGGGTACCGGAGATGCAGGA |
| | | CCCTCAGTCCTGGAAGGGAAAGGAAGGAACCTCTAGAGGGCCCTTCGAAC |
| | | AAAAACTCATCTCAGAAGAGGATCTGAATATGCATACCGGTCATCATCAC |
| | | CATCACCAT |
| 127 | variant nucleotide | ATGCACCAGCGTCACCCCCGGGCAAGATGCCCTCCCCTCTGTGTGGCCGG |
| | sequence | AATCCTTGCCTGTGGCTTTCTCCTGGGCTGCTGGGGACCCTCCCATTTCC |
| | Exemplified P11711 | AGCAGAGCTGTCTTCAGGCTTTGGAGCCACAGGCCGTGTCTTCTTACTTG |
| | | AGCCCTGGTGCTCCCTTAAAAGGCCGCCCTCCTTCCCCTGGCTTCCAGAG |
| | | GCAGAGGCAGAGGCAGAGGGGGGCTGCAGGCGGCATCCTACACCTGGAGC |
| | | TGCTGGTGGCCGTGGGCCCCGATGTCTTCCAGGCTCACCAGGAGGACACA |
| | | GAGCGCTATGTGCTCACCAACCTCAACATCGGGGCAGAACTGCTTCGGGA |
| | | CCCGTCCCTGGGGGCTCAGTTTCGGGTGCACCTGGTGAAGATGGTCATTC |
| | | TGACAGAGCCTGAGGGTGCTCCAAATATCACAGCCAACCTCACCTCGTCC |
| | | CTGCTGAGCGTCTGTGGGTGGAGCCAGACCATCAACCCTGAGGACGACAC |
| | | GGATCCTGGCCATGCTGACCTGGTCCTCTATATCACTAGGTTTGACCTGG |
| | | AGTTGCCTGATGGTAACCGGCAGGTGCGGGGCGTCACCCAGCTGGGCGGT |
| | | GCCTGCTCCCCAACCTGGAGCTGCCTCATTACCGAGGACACTGGCTTCGA |
| | | CCTGGGAGTCACCATTGCCCATGAGATTGGGCACAGCTTCGGCCTGGAGC |
| | | ACGACGGCGCGCCCGGCAGCGGCTGCGGCCCCAGCGGACACGTGATGGCT |
| | | TCGGACGGCGCCGCGCCCCGCGCCGGCCTCGCCTGGTCCCCCTGCAGCCG |
| | | CCGGCAGCTGCTGAGCCTGCTCAGCGCAGGACGGGCGCGCTGCGTGTGGG |
| | | ACCCGCCGCGGCCTCAACCCGGGTCCGCGGGGCACCCGCCGGATGCGCAG |
| | | CCTGGCCTCTACTACAGCGCCAACGAGCAGTGCCGCGTGGCCTTCGGCCC |
| | | CAAGGCTGTCGCCTGCACCTTCGCCAGGGAGCACCTGGATATGTGCCAGG |
| | | CCCTCTCCTGCCACACAGACCCGCTGGACCAAAGCAGCTGCAGCCGCCTC |
| | | CTCGTTCCTCTCCTGGATGGGACAGAATGTGGCGTGGAGAAGTGGTGCTC |
| | | CAAAGGTCGCTGCCGCTCCCTGGTGGAGCTGACCCCCATAGCAGCAGTGC |
| | | ATGGGCGCTGGTCTAGCTGGGGTCCCCGAAGTCCTTGCTCCCGCTCCTGC |
| | | GGAGGAGGTGTGGTCACCAGGAGGCGGCAGTGCAACAACCCCAGACCTGC |
| | | CTTTGGGGGGCGTGCATGTGTTGGTGCTGACCTCCAGGCCGAGATGTGCA |
| | | ACACTCAGGCCTGCGAGAAGACCCAGCTGGAGTTCATGTCGCAACAGTGC |
| | | GCCAGGACCGACGGCCAGCCGCTGCGCTCCTCCCCTGGGGGCGCCTCCTT |
| | | CTACCACTGGGGTGCTGCTGTACCACACAGCCAAGGGGATGCTCTGTGCA |
| | | GACACATGTGCCGGGCCATTGGCGAGAGCTTCATCATGAAGCGTGCCCTG |
| | | AGCCTGTGTGTGTCGGGCAGCTGCAGGACATTTGGCTGTGATGGTAGGAT |
| | | GGAGAGACAGCTTCCTCGATGGGACCCGGTGTATGCCAAGTGGCCCCCGG |
| | | GAGGACGGGACTCCCAGCAGGTATGGGACAGGTGCCAGGTGTGTGGTGGG |
| | | GACAACAGCACGTGCAGCCCACGGAAGGGCTCTTTCACAGCTGGCAGAGC |
| | | GAGAGAATATGTCACGTTTCTGACAGTTACCCCCAACCTGACCAGTGTCT |
| | | ACATTGCCAACCACAGGCCTCTCTTCACACACTTGGCGGTGAGGATCGGA |
| | | GGGCGCTATGTCGTGGCTGGGAAGATGAGCATCTCCCCTAACACCACCTA |
| | | CCCCTCCCTCCTGGAGGATGGTCGTGTCGAGTACAGAGTGGCCCTCACCG |
| | | AGGACCGGCTGCCCCGCCTGGAGGAGATCCGCATCTGGGGACCCCTCCAG |
| | | GAAGATGCTGACATCCAGGTTTACAGGCGGTATGGCGAGGAGTATGGCAA |
| | | CCTCACCCGCCCAGACATCACCTTCACCTACTTCCAGCCTAAGCCACGGC |
| | | AGGCCTGGGTGTGGGCCGCTGTGCGTGGGCCCTGCTCGGTGAGCTGTGGG |
| | | GCAGGGCTGCGCTGGGTAAACTACAGCTGCCTGGACCAGGCCAGGAAGGA |
| | | GTTGGTGGAGACTGTCCAGTGCCAAGGGAGCCAGCAGCCACCAGCGTGGC |
| | | CAGAGGCCTGCGTGCTCGAACCCTGCCCTCCCTACTGGGCGGTGGGAGAC |
| | | TTCGGCCCATGCAGCGCCTCCTGTGGGGGTGGCCTGGGGGAGCGGCCAGT |
| | | GCGCTGCGTGGAGGCCCAGGGCAGCCTCCTGAAGACATTGCCCCCAGCCC |
| | | GGTGCAGAGCAGGGGCCCAGCAGCCAGCTGTGGCGCTGGAAACCTGCAAC |
| | | CCCCAGCCCTGCCCTGCCAGGTGGGAGGTGTCAGAGCCCAGCTCATGCAC |
| | | ATCAGCTGGTGGAGCAGGCCTGGCCTTGGAGAACGAGACCTGTGTGCCAG |
| | | GGGCAGATGGCCTGGAGGCTCCAGTGACTGAGGGGCCTGGCTCCGTAGAT |
| | | GAGAAGCTGCCTGCCCCTGAGCCCTGTGTCGGGATGTCATGTCCTCCAGG |
| | | CTGGGGCCATCTGGATGCCACCTCTGCAGGGGAGAAGGCTCCCTCCCCAT |
| | | GGGGCAGCATCAGGACGGGGGCTCAAGCTGCACACGTGTGGACCCCTGCG |
| | | GCAGGGTCGTGCTCCGTCTCCTGCGGGCGAGGTCTGATGGAGCTCCGTTT |
| | | CCTGTGCATGGACTCTGCCCTCAGGGTGCCTGTCCAGGAAGAGCTGTGTG |
| | | GCCTGGCAAGCAAGCCTGGGAGCCGGGGGGAGGTCTGCCAGGCTGTCCCG |
| | | TGCCCTGCTCGGTGGCAGTACAAGCTGGCGGCCTGCAGCGTGAGCTGTGG |
| | | GAGAGGGGTCGTGCGGAGGATCCTGTATTGTGCCCGGGCCCATGGGGAGG |
| | | ACGATGGTGAGGAGATCCTGTTGGACACCCAGTGCCAGGGGCTGCCTCGC |
| | | CCGGAACCCCAGGAGGCCTGCAGCCTGGAGCCCTGCCCACCTAGGTGGAA |
| | | AGTCATGTCCCTTGGCCCATGTTCGGCCAGCTGTGGCCTTGGCACTGCTA |
| | | GACGCTCGGTGGCCTGTGTGCAGCTCGACCAAGGCCAGGACGTGGAGGTG |
| | | GACGAGGCGGCCTGTGCGGCGCTGGTGCGGCCCGAGGCCAGTGTCCCCTG |
| | | TCTCATTGCCGACTGCACCTACCGCTGGCATGTTGGCACCTGGATGGAGT |
| | | GCTCTGTTTCCTGTGGGGATGGCATCCAGCGCCGGCGTGACACCTGCCTC |
| | | GGACCCCAGGCCCAGGCGCCTGTGCCAGCTGATTTCTGCCAGCACTTGCC |
| | | CAAGCCGGTGACTGTGCGTGGCTGCTGGGCTGGGCCCTGTGTGGGACAGG |
| | | GTACGCCCAGCCTGGTGCCCCACGAAGAAGCCGCTGCTCCAGGACGGACC |
| | | ACAGCCACCCCTGCTGGTGCCTCCCTGGAGTGGTCCCAGGCCCGGGGCCT |
| | | GCTCTTCTCCATTGCTCCCCAGCCTCGGCGGCTCCTGCCCGGGCCCCAGG |
| | | AAAACTCAGTGCAGTCCAGTGCCTGTGGCAGGCAGCACCTTGAGCCAACA |
| | | GGAACCATTGACATGCGAGGCCCAGGGCAGGCAGACTGTGCAGTGGCCAT |
| | | TGGGGGGCCCCTCGGGGAGGTGGTGACCCTCCGCGTCCTTGAGAGTTCTC |
| | | TCAACTGCAGTGCGGGGGACATGTTGCTGCTTTGGGGCCGGCTCACCTGG |
| | | AGGAAGATGTGCAGGAAGCTGTTGGACATGACTTTCAGCTCCAAGACCAA |
| | | CACGCTGGTGGTGAGGCAGCGCTGGGGGGGGCCAGGAGGTGGGGTGCTGC |
| | | TGCGGTATGGGAGCCAGCTTGCTCCTGAAACCTTCTACAGAGAATGTGAC |
| | | ATGCAGCTCTTTGGGCCCTGGGGTGAAATCGTGAGCCCCTCGCTGAGTCC |
| | | AGCCACGAGTAATGCAGGGGGCTGCCGGCTCTTCATTAATGTGGCTCCGC |
| | | ACGCACGGATTGCCATCCATGCCCTGGCCACCAACATGGGCGCTGGGACC |
| | | GAGGGAGCCAATGCCAGCTACATCTTGATCCGGGACACCCACAGCTTGAG |
| | | GACCACAGCGTTCCATGGGCAGCAGGTGCTCTACTGGGAGTCAGAGAGCA |
| | | GCCAGGCTGAGATGGAGTTCAGCGAGGGCTTCCTGAAGGCTCAGGCCAGC |
| | | CTGCGGGGCCAGTACTGGACCCTCCAATCATGGGTACCGGAGATGCAGGA |
| | | CCCTCAGTCCTGGAAGGGAAAGGAAGGAACCTCTAGAGGGCCCTTCGAAC |
| | | AAAAACTCATCTCAGAAGAGGATCTGAATATGCATACCGGTCATCATCAC |
| | | CATCACCAT |
| 128 | Exemplified P1173K | ATGCACCAGCGTCACCCCCGGGCAAGATGCCCTCCCCTCTGTGTGGCCGG |
| | variant nucleotide | AATCCTTGCCTGTGGCTTTCTCCTGGGCTGCTGGGGACCCTCCCATTTCC |
| | sequence | AGCAGAGCTGTCTTCAGGCTTTGGAGCCACAGGCCGTGTCTTCTTACTTG |
| | | AGCCCTGGTGCTCCCTTAAAAGGCCGCCCTCCTTCCCCTGGCTTCCAGAG |
| | | GCAGAGGCAGAGGCAGAGGGGGCTGCAGGCGGCATCCTACACCTGGAGCT |
| | | GCTGGTGGCCGTGGGCCCCGATGTCTTCCAGGCTCACCAGGAGGACACAG |
| | | AGCGCTATGTGCTCACCAACCTCAACATCGGGGCAGAACTGCTTCGGGAC |
| | | CCGTCCCTGGGGGCTCAGTTTCGGGTGCACCTGGTGAAGATGGTCATTCT |
| | | GACAGAGCCTGAGGGTGCTCCAAATATCACAGCCAACCTCACCTCGTCCC |
| | | TGCTGAGCGTCTGTGGGTGGAGCCAGACCATCAACCCTGAGGACGACACG |
| | | GATCCTGGCCATGCTGACCTGGTCCTCTATATCACTAGGTTTGACCTGGA |
| | | GTTGCCTGATGGTAACCGGCAGGTGCGGGGCGTCACCCAGCTGGGCGGTG |
| | | CCTGCTCCCCAACCTGGAGCTGCCTCATTACCGAGGACACTGGCTTCGAC |
| | | CTGGGAGTCACCATTGCCCATGAGATTGGGCACAGCTTCGGCCTGGAGCA |
| | | CGACGGCGCGCCCGGCAGCGGCTGCGGCCCCAGCGGACACGTGATGGCTT |
| | | CGGACGGCGCCGCGCCCCGCGCCGGCCTCGCCTGGTCCCCCTGCAGCCGC |
| | | CGGCAGCTGCTGAGCCTGCTCAGCGCAGGACGGGCGCGCTGCGTGTGGGA |
| | | CCCGCCGCGGCCTCAACCCGGGTCCGCGGGGCACCCGCCGGATGCGCAGC |
| | | CTGGCCTCTACTACAGCGCCAACGAGCAGTGCCGCGTGGCCTTCGGCCCC |
| | | AAGGCTGTCGCCTGCACCTTCGCCAGGGAGCACCTGGATATGTGCCAGGC |
| | | CCTCTCCTGCCACACAGACCCGCTGGACCAAAGCAGCTGCAGCCGCCTCC |
| | | TCGTTCCTCTCCTGGATGGGACAGAATGTGGCGTGGAGAAGTGGTGCTCC |
| | | AAAGGTCGCTGCCGCTCCCTGGTGGAGCTGACCCCCATAGCAGCAGTGCA |
| | | TGGGCGCTGGTCTAGCTGGGGTCCCCGAAGTCCTTGCTCCCGCTCCTGCG |
| | | GAGGAGGTGTGGTCACCAGGAGGCGGCAGTGCAACAACCCCAGACCTGCC |
| | | TTTGGGGGGCGTGCATGTGTTGGTGCTGACCTCCAGGCCGAGATGTGCAA |
| | | CACTCAGGCCTGCGAGAAGACCCAGCTGGAGTTCATGTCGCAACAGTGCG |
| | | CCAGGACCGACGGCCAGCCGCTGCGCTCCTCCCCTGGGGGCGCCTCCTTC |
| | | TACCACTGGGGTGCTGCTGTACCACACAGCCAAGGGGATGCTCTGTGCAG |
| | | ACACATGTGCCGGGCCATTGGCGAGAGCTTCATCATGAAGCGTGGAGACA |
| | | GCTTCCTCGATGGGACCCGGTGTATGCCAAGTGGCCCCCGGGAGGACGGG |
| | | ACTCCCAGCAGGTATGGGACAGGTGCCAGGTGTGTGGTGGGGACAACAGC |
| | | ACGTGCAGCCCTGAGCCTGTGTGTGTCGGGCAGCTGCAGGACATTTGGCT |
| | | GTGATGGTAGGATGGACCCACGGAAGGGCTCTTTCACAGCTGGCAGAGCG |
| | | AGAGAATATGTCACGTTTCTGACAGTTACCCCCAACCTGACCAGTGTCTA |
| | | CATTGCCAACCACAGGCCTCTCTTCACACACTTGGCGGTGAGGATCGGAG |
| | | GGCGCTATGTCGTGGCTGGGAAGATGAGCATCTCCCCTAACACCACCTAC |
| | | CCCTCCCTCCTGGAGGATGGTCGTGTCGAGTACAGAGTGGCCCTCACCGA |
| | | GGACCGGCTGCCCCGCCTGGAGGAGATCCGCATCTGGGGACCCCTCCAGG |
| | | AAGATGCTGACATCCAGGTTTACAGGCGGTATGGCGAGGAGTATGGCAAC |
| | | CTCACCCGCCCAGACATCACCTTCACCTACTTCCAGCCTAAGCCACGGCA |
| | | GGCCTGGGTGTGGGCCGCTGTGCGTGGGCCCTGCTCGGTGAGCTGTGGGG |
| | | CAGGGCTGCGCTGGGTAAACTACAGCTGCCTGGACCAGGCCAGGAAGGAG |
| | | TTGGTGGAGACTGTCCAGTGCCAAGGGAGCCAGCAGCCACCAGCGTGGCC |
| | | AGAGGCCTGCGTGCTCGAACCCTGCCCTCCCTACTGGGCGGTGGGAGACT |
| | | TCGGCCCATGCAGCGCCTCCTGTGGGGGTGGCCTGGGGGAGCGGCCAGTG |
| | | CGCTGCGTGGAGGCCCAGGGCAGCCTCCTGAAGACATTGCCCCCAGCCCG |
| | | GTGCAGAGCAGGGGCCCAGCAGCCAGGTGTGGCGCTGGAAACCTGCAACC |
| | | CCCAGCCCTGCCCTGCCAGGTGGGAGGTGTCAGAGCCCAGCTCATGCACA |
| | | TCAGCTGGTGGAGCAGGCCTGGCCTTGGAGAACGAGACCTGTGTGCCAGG |
| | | GGCAGATGGCCTGGAGGCTCCAGTGACTGAGGGGCCTGGCTCCGTAGATG |
| | | AGAAGCTGCCTGCCCCTGAGCCCTGTGTCGGGATGTCATGTCCTCCAGGC |
| | | TGGGGCCATCTGGATGCCACCTCTGCAGGGGAGAAGGCTCCCTCCCCATG |
| | | GGGCAGCATCAGGACGGGGGCTCAAGCTGCACACGTGTGGACCCCTGCGG |
| | | CAGGGTCGTGCTCCGTCTCCTGCGGGCGAGGTCTGATGGAGCTCCGTTTC |
| | | CTGTGCATGGACTCTGCCCTCAGGGTGCCTGTCCAGGAAGAGCTGTGTGG |
| | | CCTGGCAAGCAAGCCTGGGAGCCGGGGGGAGGTCTGCCAGGCTGTCCCGT |
| | | GCCCTGCTCGGTGGCAGTACAAGCTGGCGGCCTGCAGCGTGAGCTGTGGG |
| | | AGAGGGGTCGTGCGGAGGATCCTGTATTGTGCCCGGGCCCATGGGGAGGA |
| | | CGATGGTGAGGAGATCCTGTTGGACACCCAGTGCCAGGGGCTGCCTCGCC |
| | | CGGAACCCCAGGAGGCCTGCAGCCTGGAGCCCTGCCCACCTAGGTGGAAA |
| | | GTCATGTCCCTTGGCCCATGTTCGGCCAGCTGTGGCCTTGGCACTGCTAG |
| | | ACGCTCGGTGGCCTGTGTGCAGCTCGACCAAGGCCAGGACGTGGAGGTGG |
| | | ACGAGGCGGCCTGTGCGGGGCTGGTGCGGCCCGAGGCCAGTGTCCCCTGT |
| | | CTCATTGCCGACTGCACCTACCGCTGGCATGTTGGCACCTGGATGGAGTG |
| | | CTCTGTTTCCTGTGGGGATGGCATCCAGCGCCGGCGTGACACCTGCCTCG |
| | | GACCCCAGGCCCAGGCGCCTGTGCCAGCTGATTTCTGCCAGCACTTGCCC |
| | | AAGCCGGTGACTGTGCGTGGCTGCTGGGCTGGGCCCTGTGTGGGACAGGG |
| | | TACGCCCAGCCTGGTGCCCCACGAAGAAGCCGCTGCTCCAGGACGGACCA |
| | | CAGCCACCCCTGCTGGTGCCTCCCTGGAGTGGTCCCAGGCCCGGGGCCTG |
| | | CTCTTCTCCCCGGCTAAGCAGCCTCGGCGGCTCCTGCCCGGGCCCCAGGA |
| | | AAACTCAGTGCAGTCCAGTGCCTGTGGCAGGCAGCACCTTGAGCCAACAG |
| | | GAACCATTGACATGCGAGGCCCAGGGGAGGCAGACTGTGCAGTGGCCATT |
| | | GGGCGGCCCCTCGGGGAGGTGGTGACCCTCCGCGTCCTTGAGAGTTCTCT |
| | | CAACTGCAGTGCGGGGGACATGTTGCTGCTTTGGGGCCGGCTCACCTGGA |
| | | GGAAGATGTGCAGGAAGCTGTTGGACATGACTTTCAGCTCCAAGACCAAC |
| | | ACGCTGGTGGTGAGGCAGCGCTGCGGGGGGCCAGGAGGTGGGGTGCTGCT |
| | | GCGGTATGGGAGCCAGCTTGCTCCTGAAACCTTCTACAGAGAATGTGACA |
| | | TGCAGCTCTTTGGGCCCTGGGGTGAAATCGTGAGCCCCTCGCTGAGTCCA |
| | | GCCACGAGTAATGCAGGGGGCTGCCGGCTCTTCATTAATGTGGCTCCGCA |
| | | CGCACGGATTGCCATCCATGCCCTGGCCACCAACATGGGCGCTGGGACCG |
| | | AGGGAGCCAATGCCAGCTACATCTTGATCCGGGACACCCACAGCTTGAGG |
| | | ACCACAGCGTTCCATGGGCAGCAGGTGCTCTACTGGGAGTCAGAGAGCAG |
| | | CCAGGCTGAGATGGAGTTCAGCGAGGGCTTCCTGAAGGCTCAGGCCAGCC |
| | | TGCGGGGCCAGTACTGGACCCTCCAATCATGGGTACCGGAGATGCAGGAC |
| | | CCTCAGTCCTGGAAGGGAAAGGAAGGAACCTCTAGAGGGCCCTTCGAACA |
| | | AAAACTCATCTCAGAAGAGGATCTGAATATGCATACCGGTCATCATCACC |
| | | ATCACCAT |
| 129 | Exemplified P11731 | ATGCACCAGCGTCACCCCCGGGCAAGATGCCCTCCCCTCTGTGTGGCCGG |
| | variant nucleotide | AATCCTTGCCTGTGGCTTTCTCCTGGGCTGCTGGGGACCCTCCCATTTCC |
| | sequence | AGCAGAGCTGTCTTCAGGCTTTGGAGCCACAGGCCGTGTCTTCTTACTTG |
| | | AGCCCTGGTGCTCCCTTAAAAGGCCGCCCTCCTTCCCCTGGCTTCCAGAG |
| | | GCAGAGGCAGAGGCAGAGGGGGGCTGCAGGCGGCATCCTACACCTGGAGC |
| | | TGCTGGTGGCCGTGGGCCCCGATGTCTTCCAGGCTCACCAGGAGGACACA |
| | | GAGCGCTATGTGCTCACCAACCTCAACATCGGGGCAGAACTGCTTCGGGA |
| | | CCCGTCCCTGGGGGCTCAGTTTCGGGTGCACCTGGTGAAGATGGTCATTC |
| | | TGACAGAGCCTGAGGGTGCTCCAAATATCACAGCCAACCTCACCTCGTCC |
| | | CTGCTGAGCGTCTGTGGGTGGAGCCAGACCATCAACCCTGAGGACGACAC |
| | | GGATCCTGGCCATGCTGACCTGGTCCTCTATATCACTAGGTTTGACCTGG |
| | | AGTTGCCTGATGGTAACCGGCAGGTGCGGGGCGTCACCCAGCTGGGCGGT |
| | | GCCTGCTCCCCAACCTGGAGCTGCCTCATTACCGAGGACACTGGCTTCGA |
| | | CCTGGGAGTCACCATTGCCCATGAGATTGGGCACAGCTTCGGCCTGGAGC |
| | | ACGACGGCGCGCCCGGCAGCGGCTGCGGCCCCAGCGGACACGTGATGGCT |
| | | TCGGACGGCGCCGCGCCCCGCGCCGGCCTCGCCTGGTCCCCCTGCAGCCG |
| | | CCGGCAGCTGCTGAGCCTGCTCAGCGCAGGACGGGCGCGCTGCGTGTGGG |
| | | ACCCGCCGCGGCCTCAACCCGGGTCCGCGGGGCACCCGCCGGATGCGCAG |
| | | CCTGGCCTCTACTACAGCGCCAACGAGCAGTGCCGCGTGGCCTTCGGCCC |
| | | CAAGGCTGTCGCCTGCACCTTCGCCAGGGAGCACCTGGATATGTGCCAGG |
| | | CCCTCTCCTGCCACACAGACCCGCTGGACCAAAGCAGCTGCAGCCGCCTC |
| | | CTCGTTCCTCTCCTGGATGGGACAGAATGTGGCGTGGAGAAGTGGTGCTC |
| | | CAAAGGTCGCTGCCGCTCCCTGGTGGAGCTGACCCCCATAGCAGCAGTGC |
| | | ATGGGCGCTGGTCTAGCTGGGGTCCCCGAAGTCCTTGCTCCCGCTCCTGC |
| | | GGAGGAGGTGTGGTCACCAGGAGGCGGCAGTGCAACAACCCCAGACCTGC |
| | | CTTTGGGGGGCGTGCATGTGTTGGTGCTGACCTCCAGGCCGAGATGTGCA |
| | | ACACTCAGGCCTGCGAGAAGACCCAGCTGGAGTTCATGTCGCAACAGTGC |
| | | GCCAGGACCGACGGCCAGCCGCTGCGCTCCTCCCCTGGCGGCGCCTCCTT |
| | | CTACCACTGGGGTGCTGCTGTACCACACAGCCAAGGGGATGCTCTGTGCA |
| | | GACACATGTGCCGGGCCATTGGCGAGAGCTTCATCATGAAGCGTGGAGAC |
| | | AGCTTCCTCGATGGGACCCGGTGTATGCCAAGTGGCCCCCGGGAGGACGG |
| | | GACCCTGAGCCTGTGTGTGTCGGGCAGCTGCAGGACATTTGGCTGTGATG |
| | | GTAGGATGGACTCCCAGCAGGTATGGGACAGGTGCCAGGTGTGTGGTGGG |
| | | GACAACAGCACGTGCAGCCCACGGAAGGGCTCTTTCACAGCTGGCAGAGC |
| | | GAGAGAATATGTCACGTTTCTGACAGTTACCCCCAACCTGACCAGTGTCT |
| | | ACATTGCCAACCACAGGCCTCTCTTCACACACTTGGCGGTGAGGATCGGA |
| | | GGGCGCTATGTCGTGGCTGGGAAGATGAGCATCTCCCCTAACACCACCTA |
| | | CCCCTCCCTCCTGGAGGATGGTCGTGTCGAGTACAGAGTGGCCCTCACCG |
| | | AGGACCGGCTGCCCCGCCTGGAGGAGATCCGCATCTGGGGACCCCTCCAG |
| | | GAAGATGCTGACATCCAGGTTTACAGGCGGTATGGCGAGGAGTATGGCAA |
| | | CCTCACCCGCCCAGACATCACCTTCACCTACTTCCAGCCTAAGCCACGGC |
| | | AGGCCTGGGTGTGGGCCGCTGTGCGTGGGCCCTGCTCGGTGAGCTGTGGG |
| | | GCAGGGCTGCGCTGGGTAAACTACAGCTGCCTGGACCAGGCCAGGAAGGA |
| | | GTTGGTGGAGACTGTCCAGTGCCAAGGGAGCCAGCAGCCACCAGCGTGGC |
| | | CAGAGGCCTGCGTGCTCGAACCCTGCCCTCCCTACTGGGCGGTGGGAGAC |
| | | TTCGGCCCATGCAGCGCCTCCTGTGGGGGTGGCCTGGGGGAGCGGCCAGT |
| | | GCGCTGCGTGGAGGCCCAGGGCAGCCTCCTGAAGACATTGCCCCCAGCCC |
| | | GGTGCAGAGCAGGGGCCCAGCAGCCAGGTGTGGCGCTGGAAACCTGCAAC |
| | | CCCCAGCCCTGCCCTGCCAGGTGGGAGGTGTCAGAGCCCAGCTCATGCAC |
| | | ATCAGCTGGTGGAGCAGGCCTGGCCTTGGAGAACGAGACCTGTGTGCCAG |
| | | GGGCAGATGGCCTGGAGGCTCCAGTGACTGAGGGGCCTGGCTCCGTAGAT |
| | | GAGAAGCTGCCTGCCCCTGAGCCCTGTGTCGGGATGTCATGTCCTCCAGG |
| | | CTGGGGCCATCTGGATGCCACCTCTGCAGGGGAGAAGGCTCCCTCCCCAT |
| | | GGGGCAGCATCAGGACGGGGGCTCAAGCTGCACACGTGTGGACCCCTGCG |
| | | GCAGGGTCGTGCTCCGTCTCCTGCGGGCGAGGTCTGATGGAGCTCCGTTT |
| | | CCTGTGCATGGACTCTGCCCTCAGGGTGCCTGTCCAGGAAGAGCTGTGTG |
| | | GCCTGGCAAGCAAGCCTGGGAGCCGGCGGGAGGTCTGCCAGGCTGTCCCG |
| | | TGCCCTGCTCGGTGGCAGTACAAGCTGGCGGCCTGCAGCGTGAGCTGTGG |
| | | GAGAGGGGTCGTGCGGAGGATCCTGTATTGTGCCCGGGCCCATGGGGAGG |
| | | ACGATGGTGAGGAGATCCTGTTGGACACCCAGTGCCAGGGGCTGCCTCGC |
| | | CCGGAACCCCAGGAGGCCTGCAGCCTGGAGCCCTGCCCACCTAGGTGGAA |
| | | AGTCATGTCCCTTGGCCCATGTTCGGCCAGCTGTGGCCTTGGCACTGCTA |
| | | GACGCTCGGTGGCCTGTGTGCAGCTCGACCAAGGCCAGGACGTGGAGGTG |
| | | GACGAGGCGGCCTGTGCGGCGCTGGTGCGGCCCGAGGCCAGTGTCCCCTG |
| | | TCTCATTGCCGACTGCACCTACCGCTGGCATGTTGGCACCTGGATGGAGT |
| | | GCTCTGTTTCCTGTGGGGATGGCATCCAGCGCCGGCGTGACACCTGCCTC |
| | | GGACCCCAGGCCCAGGCGCCTGTGCCAGCTGATTTCTGCCAGCACTTGCC |
| | | CAAGCCGGTGACTGTGCGTGGCTGCTGGGCTGGGCCCTGTGTGGGACAGG |
| | | GTACGCCCAGCCTGGTGCCCCACGAAGAAGCCGCTGCTCCAGGACGGACC |
| | | ACAGCCACCCCTGCTGGTGCCTCCCTGGAGTGGTCCCAGGCCCGGGGCCT |
| | | GCTCTTCTCCCCGGCTATTCAGCCTCGGCGGCTCCTGCCCGGGCCCCAGG |
| | | AAAACTCAGTGCAGTCCAGTGCCTGTGGCAGGCAGCACCTTGAGCCAACA |
| | | GGAACCATTGACATGCGAGGCCCAGGGCAGGCAGACTGTGCAGTGGCCAT |
| | | TGGGCGGCCCCTCGGGGAGGTGGTGACCCTCCGCGTCCTTGAGAGTTCTC |
| | | TCAACTGCAGTGCGGGGGACATGTTGCTGCTTTGGGGCCGGCTCACCTGG |
| | | AGGAAGATGTGCAGGAAGCTGTTGGACATGACTTTCAGCTCCAAGACCAA |
| | | CACGCTGGTGGTGAGGCAGCGCTGGGGGGGGCCAGGAGGTGGGGTGCTGC |
| | | TGCGGTATGGGAGCCAGCTTGCTCCTGAAACCTTCTACAGAGAATGTGAC |
| | | ATGCAGCTCTTTGGGCCCTGGGGTGAAATCGTGAGCCCCTCGCTGAGTCC |
| | | AGCCACGAGTAATGCAGGGGGCTGCCGGCTCTTCATTAATGTGGCTCCGC |
| | | ACGCACGGATTGCCATCCATGCCCTGGCCACCAACATGGGCGCTGGGACC |
| | | GAGGGAGCCAATGCCAGCTACATCTTGATCCGGGACACCCACAGCTTGAG |
| | | GACCACAGCGTTCCATGGGCAGCAGGTGCTCTACTGGGAGTCAGAGAGCA |
| | | GCCAGGCTGAGATGGAGTTCAGCGAGGGCTTCCTGAAGGCTCAGGCCAGC |
| | | CTGCGGGGCCAGTACTGGACCCTCCAATCATGGGTACCGGAGATGCAGGA |
| | | CCCTCAGTCCTGGAAGGGAAAGGAAGGAACCTCTAGAGGGCCCTTCGAAC |
| | | AAAAACTCATCTCAGAAGAGGATCTGAATATGCATACCGGTCATCATCAC |
| | | CATCACCAT |
| 130 | Exemplified P1175K | ATGCACCAGCGTCACCCCCGGGCAAGATGCCCTCCCCTCTGTGTGGCCGG |
| | variant nucleotide | AATCCTTGCCTGTGGCTTTCTCCTGGGCTGCTGGGGACCCTCCCATTTCC |
| | sequence | AGCAGAGCTGTCTTCAGGCTTTGGAGCCACAGGCCGTGTCTTCTTACTTG |
| | | AGCCCTGGTGCTCCCTTAAAAGGCCGCCCTCCTTCCCCTGGCTTCCAGAG |
| | | GCAGAGGCAGAGGCAGAGGGGGGCTGCAGGCGGCATCCTACACCTGGAGC |
| | | TGCTGGTGGCCGTGGGCCCCGATGTCTTCCAGGCTCACCAGGAGGACACA |
| | | GAGCGCTATGTGCTCACCAACCTCAACATCGGGGCAGAACTGCTTCGGGA |
| | | CCCGTCCCTGGGGGCTCAGTTTCGGGTGCACCTGGTGAAGATGGTCATTC |
| | | TGACAGAGCCTGAGGGTGCTCCAAATATCACAGCCAACCTCACCTCGTCC |
| | | CTGCTGAGCGTCTGTGGGTGGAGCCAGACCATCAACCCTGAGGACGACAC |
| | | GGATCCTGGCCATGCTGACCTGGTCCTCTATATCACTAGGTTTGACCTGG |
| | | AGTTGCCTGATGGTAACCGGCAGGTGCGGGGCGTCACCCAGCTGGGCGGT |
| | | GCCTGCTCCCCAACCTGGAGCTGCCTCATTACCGAGGACACTGGCTTCGA |
| | | CCTGGGAGTCACCATTGCCCATGAGATTGGGCACAGCTTCGGCCTGGAGC |
| | | ACGACGGCGCGCCCGGCAGCGGCTGCGGCCCCAGCGGACACGTGATGGCT |
| | | TCGGACGGCGCCGCGCCCCGCGCCGGCCTCGCCTGGTCCCCCTGCAGCCG |
| | | CCGGCAGCTGCTGAGCCTGCTCAGCGCAGGACGGGCGCGCTGCGTGTGGG |
| | | ACCCGCCGCGGCCTCAACCCGGGTCCGGGGGGCACCCGCCGGATGCGCAG |
| | | CCTGGCCTCTACTACAGCGCCAACGAGCAGTGCCGCGTGGCCTTCGGCCC |
| | | CAAGGCTGTCGCCTGCACCTTCGCCAGGGAGCACCTGGATATGTGCCAGG |
| | | CCCTCTCCTGCCACACAGACCCGCTGGACCAAAGCAGCTGCAGCCGCCTC |
| | | CTCGTTCCTCTCCTGGATGGGACAGAATGTGGCGTGGAGAAGTGGTGCTC |
| | | CAAAGGTCGCTGCCGCTCCCTGGTGGAGCTGACCCCCATAGCAGCAGTGC |
| | | ATGGGCGCTGGTCTAGCTGGGGTCCCCGAAGTCCTTGCTCCCGCTCCTGC |
| | | GGAGGAGGTGTGGTCACCAGGAGGCGGCAGTGCAACAACCCCAGACCTGC |
| | | CTTTGGGGGGCGTGCATGTGTTGGTGCTGACCTCCAGGCCGAGATGTGCA |
| | | ACACTCAGGCCTGCGAGAAGACCCAGCTGGAGTTCATGTCGCAACAGTGC |
| | | GCCAGGACCGACGGCCAGCCGCTGCGCTCCTCCCCTGGCGGCGCCTCCTT |
| | | CTACCACTGGGGTGCTGCTGTACCACACAGCCAAGGGGATGCTCTGTGCA |
| | | GACACATGTGCCGGGCCATTGGCGAGAGCTTCATCATGAAGCGTGGAGAC |
| | | AGCTTCCTCGATGGGACCCGGTGTATGCCAAGTGGCCCCCGGGAGGACGG |
| | | GACCCTGAGCCTGTGTGTGTCGGGCAGCTGCAGGACATTTGGCTGTGATG |
| | | GTAGGATGGACTCCCAGCAGGTATGGGACAGGTGCCAGGTGTGTGGTGGG |
| | | GACAACAGCACGTGCAGCCCACGGAAGGGCTCTTTCACAGCTGGCAGAGC |
| | | GAGAGAATATGTCACGTTTCTGACAGTTACCCCCAACCTGACCAGTGTCT |
| | | ACATTGCCAACCACAGGCCTCTCTTCACACACTTGGCGGTGAGGATCGGA |
| | | GGGCGCTATGTCGTGGCTGGGAAGATGAGCATCTCCCCTAACACCACCTA |
| | | CCCCTCCCTCCTGGAGGATGGTCGTGTCGAGTACAGAGTGGCCCTCACCG |
| | | AGGACCGGCTGCCCCGCCTGGAGGAGATCCGCATCTGGGGACCCCTCCAG |
| | | GAAGATGCTGACATCCAGGTTTACAGGCGGTATGGCGAGGAGTATGGCAA |
| | | CCTCACCCGCCCAGACATCACCTTCACCTACTTCCAGCCTAAGCCACGGC |
| | | AGGCCTGGGTGTGGGCCGCTGTGCGTGGGCCCTGCTCGGTGAGCTGTGGG |
| | | GCAGGGCTGCGCTGGGTAAACTACAGCTGCCTGGACCAGGCCAGGAAGGA |
| | | GTTGGTGGAGACTGTCCAGTGCCAAGGGAGCCAGCAGCCACCAGCGTGGC |
| | | CAGAGGCCTGCGTGCTCGAACCCTGCCCTCCCTACTGGGCGGTGGGAGAC |
| | | TTCGGCCCATGCAGCGCCTCCTGTGGGGGTGGCCTGCGGGAGCGGCCAGT |
| | | GCGCTGCGTGGAGGCCCAGGGCAGCCTCCTGAAGACATTGCCCCCAGCCC |
| | | GGTGCAGAGCAGGGGCCCAGCAGCCAGGTGTGGCGCTGGAAACCTGCAAC |
| | | CCCCAGCCGTGCCCTGCCAGGTGGGAGGTGTCAGAGCCCAGCTCATGCAC |
| | | ATCAGCTGGTGGAGCAGGCCTGGCCTTGGAGAACGAGACCTGTGTGCCAG |
| | | GGGCAGATGGCCTGGAGGCTCCAGTGACTGAGGGGCCTGGCTCCGTAGAT |
| | | GAGAAGCTGCCTGCCCCTGAGCCCTGTGTCGGGATGTCATGTCCTCCAGG |
| | | CTGGGGCCATCTGGATGCCACCTCTGCAGGGGAGAAGGCTCCCTCCCCAT |
| | | GGGGCAGCATCAGGACGGGGGCTCAAGCTGCACACGTGTGGACCCCTGCG |
| | | GCAGGGTCGTGCTCCGTCTCCTGCGGGCGAGGTCTGATGGAGCTCCGTTT |
| | | CCTGTGCATGGACTCTGCCCTCAGGGTGCCTGTCCAGGAAGAGCTGTGTG |
| | | GCCTGGCAAGCAAGCCTGGGAGCCGGGGGGAGGTCTGCCAGGCTGTCCCG |
| | | TGCCCTGCTCGGTGGCAGTACAAGCTGGCGGCCTGCAGCGTGAGCTGTGG |
| | | GAGAGGGGTCGTGCGGAGGATCCTGTATTGTGCCCGGGCCCATGGGGAGG |
| | | ACGATGGTGAGGAGATCCTGTTGGACACCCAGTGCCAGGGGCTGCCTCGC |
| | | CCGGAACCCCAGGAGGCCTGCAGCCTGGAGCCCTGCCCACCTAGGTGGAA |
| | | AGTCATGTCCCTTGGCCCATGTTCGGCCAGCTGTGGCCTTGGCACTGCTA |
| | | GACGCTCGGTGGCCTGTGTGCAGCTCGACCAAGGCCAGGACGTGGAGGTG |
| | | GACGAGGCGGCCTGTGCGGCGCTGGTGCGGCCCGAGGCCAGTGTCCCCTG |
| | | TCTCATTGCCGACTGCACCTACCGCTGGCATGTTGGCACCTGGATGGAGT |
| | | GCTCTGTTTCCTGTGGGGATGGCATCCAGCGCCGGCGTGACACCTGCCTC |
| | | GGACCCCAGGCCCAGGCGCCTGTGCCAGCTGATTTCTGCCAGCACTTGCC |
| | | CAAGCCGGTGACTGTGCGTGGCTGCTGGGCTGGGCCCTGTGTGGGACAGG |
| | | GTACGCCCAGCCTGGTGCCCCACGAAGAAGCCGCTGCTCCAGGACGGACC |
| | | ACAGCCACCCCTGCTGGTGCCTCCCTGGAGTGGTCCCAGGCCCGGGGCCT |
| | | GCTCTTCTCCCCGGCTCCCCAGAAGCGGCGGCTCCTGCCCGGGCCCCAGG |
| | | AAAACTCAGTGCAGTCCAGTGCCTGTGGCAGGCAGCACCTTGAGCCAACA |
| | | GGAACCATTGACATGCGAGGCCCAGGGCAGGCAGACTGTGCAGTGGCCAT |
| | | TGGGCGGCCCCTCGGGGAGGTGGTGACCCTCCGCGTCCTTGAGAGTTCTC |
| | | TCAACTGCAGTGCGGGGGACATGTTGCTGCTTTGGGGCCGGCTCACCTGG |
| | | AGGAAGATGTGCAGGAAGCTGTTGGACATGACTTTCAGCTCCAAGACCAA |
| | | CACGCTGGTGGTGAGGCAGCGCTGCGGGGGGCCAGGAGGTGGGGTGCTGC |
| | | TGCGGTATGGGAGCCAGCTTGCTCCTGAAACCTTCTACAGAGAATGTGAC |
| | | ATGCAGCTCTTTGGGCCCTGGGGTGAAATCGTGAGCCCCTCGCTGAGTCC |
| | | AGCCACGAGTAATGCAGGGGGCTGCCGGCTCTTCATTAATGTGGCTCCGC |
| | | ACGCACGGATTGCCATCCATGCCCTGGCCACCAACATGGGCGCTGGGACC |
| | | GAGGGAGCCAATGCCAGCTACATCTTGATCCGGGACACCCACAGCTTGAG |
| | | GACCACAGCGTTCCATGGGCAGCAGGTGCTCTACTGGGAGTCAGAGAGCA |
| | | GCCAGGCTGAGATGGAGTTCAGCGAGGGCTTCCTGAAGGCTCAGGCCAGC |
| | | CTGCGGGGCCAGTACTGGACCCTCCAATCATGGGTACCGGAGATGCAGGA |
| | | CCCTCAGTCCTGGAAGGGAAAGGAAGGAACCTCTAGAGGGCCCTTCGAAC |
| | | AAAAACTCATCTCAGAAGAGGATCTGAATATGCATACCGGTCATCATCAC |
| | | CATCACCAT |
| 131 | Exemplified P11751 | ATGCACCAGCGTCACCCCCGGGCAAGATGCCCTCCCCTCTGTGTGGCCGG |
| | variant nucleotide | AATCCTTGCCTGTGGCTTTCTCCTGGGCTGCTGGGGACCCTCCCATTTCC |
| | sequence | AGCAGAGCTGTCTTCAGGCTTTGGAGCCACAGGCCGTGTCTTCTTACTTG |
| | | AGCCCTGGTGCTCCCTTAAAAGGCCGCCCTCCTTCCCCTGGCTTCCAGAG |
| | | GCAGAGGCAGAGGCAGAGGCGGGCTGCAGGCGGCATCCTACACCTGGAGC |
| | | TGCTGGTGGCCGTGGGCCCCGATGTCTTCCAGGCTCACCAGGAGGACACA |
| | | GAGCGCTATGTGCTCACCAACCTCAACATCGGGGCAGAACTGCTTCGGGA |
| | | CCCGTCCCTGGGGGCTCAGTTTCGGGTGCACCTGGTGAAGATGGTCATTC |
| | | TGACAGAGCCTGAGGGTGCTCCAAATATCACAGCCAACCTCACCTCGTCC |
| | | CTGCTGAGCGTCTGTGGGTGGAGCCAGACCATCAACCCTGAGGACGACAC |
| | | GGATCCTGGCCATGCTGACCTGGTCCTCTATATCACTAGGTTTGACCTGG |
| | | AGTTGCCTGATGGTAACCGGCAGGTGCGGGGCGTCACCCAGCTGGGGGGT |
| | | GCCTGCTCCCCAACCTGGAGCTGCCTCATTACCGAGGACACTGGCTTCGA |
| | | CCTGGGAGTCACCATTGCCCATGAGATTGGGCACAGCTTCGGCCTGGAGC |
| | | ACGACGGCGCGCCCGGCAGCGGCTGCGGCCCCAGCGGACACGTGATGGCT |
| | | TCGGACGGCGCCGCGCCCCGCGCCGGCCTCGCCTGGTCCCCCTGCAGCCG |
| | | CCGGCAGCTGCTGAGCCTGCTCAGCGCAGGACGGGCGCGCTGCGTGTGGG |
| | | ACCCGCCGCGGCCTCAACCCGGGTCCGCGGGGCACCCGCCGGATGCGCAG |
| | | CCTGGCCTCTACTACAGCGCCAACGAGCAGTGCCGCGTGGCCTTCGGCCC |
| | | CAAGGCTGTCGCCTGCACCTTCGCCAGGGAGCACCTGGATATGTGCCAGG |
| | | CCCTCTCCTGCCACACAGACCCGCTGGACCAAAGCAGCTGCAGCCGCCTC |
| | | CTCGTTCCTCTCCTGGATGGGACAGAATGTGGCGTGGAGAAGTGGTGCTC |
| | | CAAAGGTCGCTGCCGCTCCCTGGTGGAGCTGACCCCCATAGCAGCAGTGC |
| | | ATGGGCGCTGGTCTAGCTGGGGTCCCCGAAGTCCTTGCTCCCGCTCCTGC |
| | | GGAGGAGGTGTGGTCACCAGGAGGCGGCAGTGCAACAACCCCAGACCTGC |
| | | CTTTGGGGGGCGTGCATGTGTTGGTGCTGACCTCCAGGCCGAGATGTGCA |
| | | ACACTCAGGCCTGCGAGAAGACCCAGCTGGAGTTCATGTCGCAACAGTGC |
| | | GCCAGGACCGACGGCCAGCCGCTGCGCTCCTCCCCTGGGGGCGCCTCCTT |
| | | CTACCACTGGGGTGCTGCTGTACCACACAGCCAAGGGGATGCTCTGTGCA |
| | | GACACATGTGCCGGGCCATTGGCGAGAGCTTCATCATGAAGCGTGGAGAC |
| | | AGCTTCCTCGATGGGACCCGGTGTATGCCAAGTGGCCCCCGGGAGGACGG |
| | | GACCCTGAGCCTGTGTGTGTCGGGCAGCTGCAGGACATTTGGCTGTGATG |
| | | GTAGGATGGACTCCCAGCAGGTATGGGACAGGTGCCAGGTGTGTGGTGGG |
| | | GACAACAGCACGTGCAGCCCACGGAAGGGCTCTTTCACAGCTGGCAGAGC |
| | | GAGAGAATATGTCACGTTTCTGACAGTTACCCCCAACCTGACCAGTGTCT |
| | | ACATTGCCAACCACAGGCCTCTCTTCACACACTTGGCGGTGAGGATCGGA |
| | | GGGCGCTATGTCGTGGCTGGGAAGATGAGCATCTCCCCTAACACCACCTA |
| | | CCCCTCCCTCCTGGAGGATGGTCGTGTCGAGTACAGAGTGGCCCTCACCG |
| | | AGGACCGGCTGCCCCGCCTGGAGGAGATCCGCATCTGGGGACCCCTCCAG |
| | | GAAGATGCTGACATCCAGGTTTACAGGCGGTATGGCGAGGAGTATGGCAA |
| | | CCTCACCCGCCCAGACATCACCTTCACCTACTTCCAGCCTAAGCCACGGC |
| | | AGGCCTGGGTGTGGGCCGCTGTGCGTGGGCCCTGCTCGGTGAGCTGTGGG |
| | | GCAGGGCTGCGCTGGGTAAACTACAGCTGCCTGGACCAGGCCAGGAAGGA |
| | | GTTGGTGGAGACTGTCCAGTGCCAAGGGAGCCAGCAGCCACCAGCGTGGC |
| | | CAGAGGCCTGCGTGCTCGAACCCTGCCCTCCCTACTGGGCGGTGGGAGAC |
| | | TTCGGCCCATGCAGCGCCTCCTGTGGGGGTGGCCTGCGGGAGCGGCCAGT |
| | | GCGCTGCGTGGAGGCCCAGGGCAGCCTCCTGAAGACATTGCCCCCAGCCC |
| | | GGTGCAGAGCAGGGGCCCAGCAGCCAGCTGTGGCGCTGGAAACCTGCAAC |
| | | CCCCAGCCCTGCCCTGCCAGGTGGGAGGTGTCAGAGCCCAGCTCATGCAC |
| | | ATCAGCTGGTGGAGCAGGCCTGGCCTTGGAGAACGAGACCTGTGTGCCAG |
| | | GGGCAGATGGCCTGGAGGCTCCAGTGACTGAGGGGCCTGGCTCCGTAGAT |
| | | GAGAAGCTGCCTGCCCCTGAGCCCTGTGTCGGGATGTCATGTCCTCCAGG |
| | | CTGGGGCCATCTGGATGCCACCTCTGCAGGGGAGAAGGCTCCCTCCCCAT |
| | | GGGGCAGCATCAGGACGGGGGCTCAAGCTGCACACGTGTGGACCCCTGCG |
| | | GCAGGGTCGTGCTCCGTCTCCTGCGGGCGAGGTCTGATGGAGCTCCGTTT |
| | | CCTGTGCATGGACTCTGCCCTCAGGGTGCCTGTCCAGGAAGAGCTGTGTG |
| | | GCCTGGCAAGCAAGCCTGGGAGCCGGGGGGAGGTCTGCCAGGCTGTCCCG |
| | | TGCCCTGCTCGGTGGCAGTACAAGCTGGCGGCCTGCAGCGTGAGCTGTGG |
| | | GAGAGGGGTCGTGCGGAGGATCCTGTATTGTGCCCGGGCCCATGGGGAGG |
| | | ACGATGGTGAGGAGATCCTGTTGGACACCCAGTGCCAGGGGCTGCCTCGC |
| | | CCGGAACCCCAGGAGGCCTGCAGCCTGGAGCCCTGCCCACCTAGGTGGAA |
| | | AGTCATGTCCCTTGGCCCATGTTCGGCCAGCTGTGGCCTTGGCACTGCTA |
| | | GACGCTCGGTGGCCTGTGTGCAGCTCGACCAAGGCCAGGACGTGGAGGTG |
| | | GACGAGGCGGCCTGTGCGGCGCTGGTGCGGCCCGAGGCCAGTGTCCCCTG |
| | | TCTCATTGCCGACTGCACCTACCGCTGGCATGTTGGCACCTGGATGGAGT |
| | | GCTCTGTTTCCTGTGGGGATGGCATCCAGCGCCGGCGTGACACCTGCCTC |
| | | GGACCCCAGGCCCAGGCGCCTGTGCCAGCTGATTTCTGCCAGCACTTGCC |
| | | CAAGCCGGTGACTGTGCGTGGCTGCTGGGCTGGGCCCTGTGTGGGACAGG |
| | | GTACGCCCAGCCTGGTGCCCCACGAAGAAGCCGCTGCTCCAGGACGGACC |
| | | ACAGCCACCCCTGCTGGTGCCTCCCTGGAGTGGTCCCAGGCCCGGGGCCT |
| | | GCTCTTCTCCCCGGCTCCCCAGATTCGGCGGCTCCTGCCCGGGCCCCAGG |
| | | AAAACTCAGTGCAGTCCAGTGCCTGTGGCAGGCAGCACCTTGAGCCAACA |
| | | GGAACCATTGACATGCGAGGCCCAGGGCAGGCAGACTGTGCAGTGGCCAT |
| | | TGGGCGGCCCCTCGGGGAGGTGGTGACCCTCCGCGTCCTTGAGAGTTCTC |
| | | TCAACTGCAGTGCGGGGGACATGTTGCTGCTTTGGGGCCGGCTCACCTGG |
| | | AGGAAGATGTGCAGGAAGCTGTTGGACATGACTTTCAGCTCCAAGACCAA |
| | | CACGCTGGTGGTGAGGCAGCGCTGGGGGGGGCCAGGAGGTGGGGTGCTGC |
| | | TGCGGTATGGGAGCCAGCTTGCTCCTGAAACCTTCTACAGAGAATGTGAC |
| | | ATGCAGCTCTTTGGGCCCTGGGGTGAAATCGTGAGCCCCTCGCTGAGTCC |
| | | AGCCACGAGTAATGCAGGGGGCTGCCGGCTCTTCATTAATGTGGCTCCGC |
| | | ACGCACGGATTGCCATCCATGCCCTGGCCACCAACATGGGCGCTGGGACC |
| | | GAGGGAGCCAATGCCAGCTACATCTTGATCCGGGACACCCACAGCTTGAG |
| | | GACCACAGCGTTCCATGGGCAGCAGGTGCTCTACTGGGAGTCAGAGAGCA |
| | | GCCAGGCTGAGATGGAGTTCAGCGAGGGCTTCCTGAAGGCTCAGGCCAGC |
| | | CTGCGGGGCCAGTACTGGACCCTCCAATCATGGGTACCGGAGATGCAGGA |
| | | CCCTCAGTCCTGGAAGGGAAAGGAAGGAACCTCTAGAGGGCCCTTCGAAC |
| | | AAAAACTCATCTCAGAAGAGGATCTGAATATGCATACCGGTCATCATCAC |
| | | CATCACCAT |
| 132 | variant nucleotide | ATGCACCAGCGTCACCCCCGGGCAAGATGCCCTCCCCTCTGTGTGGCCGG |
| | Exemplified P1180K | AATCCTTGCCTGTGGCTTTCTCCTGGGCTGCTGGGGACCCTCCCATTTCC |
| | sequence | AGCAGAGCTGTCTTCAGGCTTTGGAGCCACAGGCCGTGTCTTCTTACTTG |
| | | AGCCCTGGTGCTCCCTTAAAAGGCCGCCCTCCTTCCCCTGGCTTCCAGAG |
| | | GCAGAGGCAGAGGCAGAGGCGGGCTGCAGGCGGCATCCTACACCTGGAGC |
| | | TGCTGGTGGCCGTGGGCCCCGATGTCTTCCAGGCTCACCAGGAGGACACA |
| | | GAGCGCTATGTGCTCACCAACCTCAACATCGGGGCAGAACTGCTTCGGGA |
| | | CCCGTCCCTGGGGGCTCAGTTTCGGGTGCACCTGGTGAAGATGGTCATTC |
| | | TGACAGAGCCTGAGGGTGCTCCAAATATCACAGCCAACCTCACCTCGTCC |
| | | CTGCTGAGCGTCTGTGGGTGGAGCCAGACCATCAACCCTGAGGACGACAC |
| | | GGATCCTGGCCATGCTGACCTGGTCCTCTATATCACTAGGTTTGACCTGG |
| | | AGTTGCCTGATGGTAACCGGCAGGTGCGGGGCGTCACCCAGCTGGGGGTG |
| | | CCTGCTCCCCAACCTGGAGCTGCCTCATTACCGAGGACACTGGCTTCGAC |
| | | CTGGGAGTCACCATTGCCCATGAGATTGGGCACAGCTTCGGCCTGGAGCA |
| | | CGACGGCGCGCCCGGCAGCGGCTGCGGCCCCAGCGGACACGTGATGGCTT |
| | | CGGACGGCGCCGCGCCCCGCGCCGGCCTCGCCTGGTCCCCCTGCAGCCGC |
| | | CGGCAGCTGCTGAGCCTGCTCAGCGCAGGACGGGCGCGCTGCGTGTGGGA |
| | | CCCGCCGCGGCCTCAACCCGGGTCCGCGGGGCACCCGCCGGATGCGCAGC |
| | | CTGGCCTCTACTACAGCGCCAACGAGCAGTGCCGCGTGGCCTTCGGCCCC |
| | | AAGGCTGTCGCCTGCACCTTCGCCAGGGAGCACCTGGATATGTGCCAGGC |
| | | CCTCTCCTGCCACACAGACCCGCTGGACCAAAGCAGCTGCAGCCGCCTCC |
| | | TCGTTCCTCTCCTGGATGGGACAGAATGTGGCGTGGAGAAGTGGTGCTCC |
| | | AAAGGTCGCTGCCGCTCCCTGGTGGAGCTGACCCCCATAGCAGCAGTGCA |
| | | TGGGCGCTGGTCTAGCTGGGGTCCCCGAAGTCCTTGCTCCCGCTCCTGCG |
| | | GAGGAGGTGTGGTCACCAGGAGGCGGCAGTGCAACAACCCCAGACCTGCC |
| | | TTTGGGGGGCGTGCATGTGTTGGTGCTGACCTCCAGGCCGAGATGTGCAA |
| | | CACTCAGGCCTGCGAGAAGACCCAGCTGGAGTTCATGTCGCAACAGTGCG |
| | | CCAGGACCGACGGCCAGCCGCTGCGCTCCTCCCCTGGGGGCGCCTCCTTC |
| | | TACCACTGGGGTGCTGCTGTACCACACAGCCAAGGGGATGCTCTGTGCAG |
| | | ACACATGTGCCGGGCCATTGGCGAGAGCTTCATCATGAAGCGTGGAGACA |
| | | GCTTCCTCGATGGGACCCGGTGTATGCCAAGTGGCCCCCGGGAGGACGGG |
| | | ACCCTGAGCCTGTGTGTGTCGGGCAGCTGCAGGACATTTGGCTGTGATGG |
| | | TAGGATGGACTCCCAGCAGGTATGGGACAGGTGCCAGGTGTGTGGTGGGG |
| | | ACAACAGCACGTGCAGGGCGGTGAGGATCGGAGGGCGCTATGTCGTGGCT |
| | | GGGAAGATGAGCATCTCCCCTAACCCACGGAAGGGCTCTTTCACAGCTGG |
| | | CAGAGCGAGAGAATATGTCACGTTTCTGACAGTTACCCCCAACCTGACCA |
| | | GTGTCTACATTGCCAACCACAGGCCTCTCTTCACACACTTCACCACCTAC |
| | | CCCTCCCTCCTGGAGGATGGTCGTGTCGAGTACAGAGTGGCCCTCACCGA |
| | | GGACCGGCTGCCCCGCCTGGAGGAGATCCGCATCTGGGGACCCCTCCAGG |
| | | AAGATGCTGACATCCAGGTTTACAGGCGGTATGGCGAGGAGTATGGCAAC |
| | | CTCACCCGCCCAGACATCACCTTCACCTACTTCCAGCCTAAGCCACGGCA |
| | | GGCCTGGGTGTGGGCCGCTGTGCGTGGGCCCTGCTCGGTGAGCTGTGGGG |
| | | CAGGGCTGCGCTGGGTAAACTACAGCTGCCTGGACCAGGCCAGGAAGGAG |
| | | TTGGTGGAGACTGTCCAGTGCCAAGGGAGCCAGCAGCCACCAGCGTGGCC |
| | | AGAGGCCTGCGTGCTCGAACCCTGCCCTCCCTACTGGGCGGTGGGAGACT |
| | | TCGGCCCATGCAGCGCCTCCTGTGGGGGTGGCCTGCGGGAGCGGCCAGTG |
| | | CGCTGCGTGGAGGCCCAGGGCAGCCTCCTGAAGACATTGCCCCCAGCCCG |
| | | GTGCAGAGCAGGGGCCCAGCAGCCAGCTGTGGCGCTGGAAACCTGCAACC |
| | | CCCAGCCCTGCCCTGCCAGGTGGGAGGTGTCAGAGCCCAGCTCATGCACA |
| | | TCAGCTGGTGGAGCAGGCCTGGCCTTGGAGAACGAGACCTGTGTGCCAGG |
| | | GGCAGATGGCCTGGAGGCTCCAGTGACTGAGGGGCCTGGCTCCGTAGATG |
| | | AGAAGCTGCCTGCCCCTGAGCCCTGTGTCGGGATGTCATGTCCTCCAGGC |
| | | TGGGGCCATCTGGATGCCACCTCTGCAGGGGAGAAGGCTCCCTCCCCATG |
| | | GGGCAGCATCAGGACGGGGGCTCAAGCTGCACACGTGTGGACCCCTGCGG |
| | | CAGGGTCGTGCTCCGTCTCCTGCGGGCGAGGTCTGATGGAGCTCCGTTTC |
| | | CTGTGCATGGACTCTGCCCTCAGGGTGCCTGTCCAGGAAGAGCTGTGTGG |
| | | CCTGGCAAGCAAGCCTGGGAGCCGGGGGGAGGTCTGCCAGGCTGTCCCGT |
| | | GCCCTGCTCGGTGGCAGTACAAGCTGGCGGCCTGCAGCGTGAGCTGTGGG |
| | | AGAGGGGTCGTGCGGAGGATCCTGTATTGTGCCCGGGCCCATGGGGAGGA |
| | | CGATGGTGAGGAGATCCTGTTGGACACCCAGTGCCAGGGGCTGCCTCGCC |
| | | CGGAACCCCAGGAGGCCTGCAGCCTGGAGCCCTGCCCACCTAGGTGGAAA |
| | | GTCATGTCCCTTGGCCCATGTTCGGCCAGCTGTGGCCTTGGCACTGCTAG |
| | | ACGCTCGGTGGCCTGTGTGCAGCTCGACCAAGGCCAGGACGTGGAGGTGG |
| | | ACGAGGCGGCCTGTGCGGCGCTGGTGCGGCCCGAGGCCAGTGTCCCCTGT |
| | | CTCATTGCCGACTGCACCTACCGCTGGCATGTTGGCACCTGGATGGAGTG |
| | | CTCTGTTTCCTGTGGGGATGGCATCCAGCGCCGGCGTGACACCTGCCTCG |
| | | GACCCCAGGCCCAGGCGCCTGTGCCAGCTGATTTCTGCCAGCACTTGCCC |
| | | AAGCCGGTGACTGTGCGTGGCTGCTGGGCTGGGCCCTGTGTGGGACAGGG |
| | | TACGCCCAGCCTGGTGCCCCACGAAGAAGCCGCTGCTCCAGGACGGACCA |
| | | CAGCCACCCCTGCTGGTGCCTCCCTGGAGTGGTCCCAGGCCCGGGGCCTG |
| | | CTCTTCTCCCCGGCTCCCCAGCCTCGGCGGCTCCTGAAGGGGCCCCAGGA |
| | | AAACTCAGTGCAGTCCAGTGCCTGTGGCAGGCAGCACCTTGAGCCAACAG |
| | | GAACCATTGACATGCGAGGCCCAGGGGAGGCAGACTGTGCAGTGGCCATT |
| | | GGGGGGCCCCTCGGGGAGGTGGTGACCCTCCGCGTCCTTGAGAGTTCTCT |
| | | CAACTGCAGTGCGGGGGACATGTTGCTGCTTTGGGGCCGGCTCACCTGGA |
| | | GGAAGATGTGCAGGAAGCTGTTGGACATGACTTTCAGCTCCAAGACCAAC |
| | | ACGCTGGTGGTGAGGCAGCGCTGCGGGCGGCCAGGAGGTGGGGTGCTGCT |
| | | GCGGTATGGGAGCCAGCTTGCTCCTGAAACCTTCTACAGAGAATGTGACA |
| | | TGCAGCTCTTTGGGCCCTGGGGTGAAATCGTGAGCCCCTCGCTGAGTCCA |
| | | GCCACGAGTAATGCAGGGGGCTGCCGGCTCTTCATTAATGTGGCTCCGCA |
| | | CGCACGGATTGCCATCCATGCCCTGGCCACCAACATGGGCGCTGGGACCG |
| | | AGGGAGCCAATGCCAGCTACATCTTGATCCGGGACACCCACAGCTTGAGG |
| | | ACCACAGCGTTCCATGGGCAGCAGGTGCTCTACTGGGAGTCAGAGAGCAG |
| | | CCAGGCTGAGATGGAGTTCAGCGAGGGCTTCCTGAAGGCTCAGGCCAGCC |
| | | TGCGGGGCCAGTACTGGACCCTCCAATCATGGGTACCGGAGATGCAGGAC |
| | | CCTCAGTCCTGGAAGGGAAAGGAAGGAACCTCTAGAGGGCCCTTCGAACA |
| | | AAAACTCATCTCAGAAGAGGATCTGAATATGCATACCGGTCATCATCACC |
| | | ATCACCAT |
| 133 | Exemplified P11801 | ATGCACCAGCGTCACCCCCGGGCAAGATGCCCTCCCCTCTGTGTGGCCGG |
| | variant nucleotide | AATCCTTGCCTGTGGCTTTCTCCTGGGCTGCTGGGGACCCTCCCATTTCC |
| | sequence | AGCAGAGCTGTCTTCAGGCTTTGGAGCCACAGGCCGTGTCTTCTTACTTG |
| | | AGCCCTGGTGCTCCCTTAAAAGGCCGCCCTCCTTCCCCTGGCTTCCAGAG |
| | | GCAGAGGCAGAGGCAGAGGGGGGCTGCAGGCGGCATCCTACACCTGGAGC |
| | | TGCTGGTGGCCGTGGGCCCCGATGTCTTCCAGGCTCACCAGGAGGACACA |
| | | GAGCGCTATGTGCTCACCAACCTCAACATCGGGGCAGAACTGCTTCGGGA |
| | | CCCGTCCCTGGGGGCTCAGTTTCGGGTGCACCTGGTGAAGATGGTCATTC |
| | | TGACAGAGCCTGAGGGTGCTCCAAATATCACAGCCAACCTCACCTCGTCC |
| | | CTGCTGAGCGTCTGTGGGTGGAGCCAGACCATCAACCCTGAGGACGACAC |
| | | GGATCCTGGCCATGCTGACCTGGTCCTCTATATCACTAGGTTTGACCTGG |
| | | AGTTGCCTGATGGTAACCGGCAGGTGCGGGGCGTCACCCAGCTGGGCGGT |
| | | GCCTGCTCCCCAACCTGGAGCTGCCTCATTACCGAGGACACTGGCTTCGA |
| | | CCTGGGAGTCACCATTGCCCATGAGATTGGGCACAGCTTCGGCCTGGAGC |
| | | ACGACGGCGCGCCCGGCAGCGGCTGCGGCCCCAGCGGACACGTGATGGCT |
| | | TCGGACGGCGCCGCGCCCCGCGCCGGCCTCGCCTGGTCCCCCTGCAGCCG |
| | | CCGGCAGCTGCTGAGCCTGCTCAGCGCAGGACGGGCGCGCTGCGTGTGGG |
| | | ACCCGCCGCGGCCTCAACCCGGGTCCGCGGGGCACCCGCCGGATGCGCAG |
| | | CCTGGCCTCTACTACAGCGCCAACGAGCAGTGCCGCGTGGCCTTCGGCCC |
| | | CAAGGCTGTCGCCTGCACCTTCGCCAGGGAGCACCTGGATATGTGCCAGG |
| | | CCCTCTCCTGCCACACAGACCCGCTGGACCAAAGCAGCTGCAGCCGCCTC |
| | | CTCGTTCCTCTCCTGGATGGGACAGAATGTGGCGTGGAGAAGTGGTGCTC |
| | | CAAAGGTCGCTGCCGCTCCCTGGTGGAGCTGACCCCCATAGCAGCAGTGC |
| | | ATGGGCGCTGGTCTAGCTGGGGTCCCCGAAGTCCTTGCTCCCGCTCCTGC |
| | | GGAGGAGGTGTGGTCACCAGGAGGCGGCAGTGCAACAACCCCAGACCTGC |
| | | CTTTGGGGGGCGTGCATGTGTTGGTGCTGACCTCCAGGCCGAGATGTGCA |
| | | ACACTCAGGCCTGCGAGAAGACCCAGCTGGAGTTCATGTCGCAACAGTGG |
| | | GCCAGGACCGACGGCCAGCCGCTGCGCTCCTCCCCTGGGGGCGCCTCCTT |
| | | CTACCACTGGGGTGCTGCTGTACCACACAGCCAAGGGGATGCTCTGTGCA |
| | | GACACATGTGCCGGGCCATTGGCGAGAGCTTCATCATGAAGCGTGGAGAC |
| | | AGCTTCCTCGATGGGACCCGGTGTATGCCAAGTGGCCCCCGGGAGGACGG |
| | | GACCCTGAGCCTGTGTGTGTCGGGCAGCTGCAGGACATTTGGCTGTGATG |
| | | GTAGGATGGACTCCCAGCAGGTATGGGACAGGTGCCAGGTGTGTGGTGGG |
| | | GACAACAGCACGTGCAGCCCACGGAAGGGCTCTTTCACAGCTGGCAGAGC |
| | | GAGAGAATATGTCACGTTTCTGACAGTTACCCCCAACCTGACCAGTGTCT |
| | | ACATTGCCAACCACAGGCCTCTCTTCACACACTTGGCGGTGAGGATCGGA |
| | | GGGCGCTATGTCGTGGCTGGGAAGATGAGCATCTCCCCTAACACCACCTA |
| | | CCCCTCCCTCCTGGAGGATGGTCGTGTCGAGTACAGAGTGGCCCTCACCG |
| | | AGGACCGGCTGCCCCGCCTGGAGGAGATCCGCATCTGGGGACCCCTCCAG |
| | | GAAGATGCTGACATCCAGGTTTACAGGCGGTATGGCGAGGAGTATGGCAA |
| | | CCTCACCCGCCCAGACATCACCTTCACCTACTTCCAGCCTAAGCCACGGC |
| | | AGGCCTGGGTGTGGGCCGCTGTGCGTGGGCCCTGCTCGGTGAGCTGTGGG |
| | | GCAGGGCTGCGCTGGGTAAACTACAGCTGCCTGGACCAGGCCAGGAAGGA |
| | | GTTGGTGGAGACTGTCCAGTGCCAAGGGAGCCAGCAGCCACCAGCGTGGC |
| | | CAGAGGCCTGCGTGCTCGAACCCTGCCCTCCCTACTGGGCGGTGGGAGAC |
| | | TTCGGCCCATGCAGCGCCTCCTGTGGGGGTGGCCTGGGGGAGCGGCCAGT |
| | | GCGCTGCGTGGAGGCCCAGGGCAGCCTCCTGAAGACATTGCCCCCAGCCC |
| | | GGTGCAGAGCAGGGGCCCAGCAGCCAGCTGTGGCGCTGGAAACCTGCAAC |
| | | CCCCAGCCCTGCCCTGCCAGGTGGGAGGTGTCAGAGCCCAGCTCATGCAC |
| | | ATCAGCTGGTGGAGCAGGCCTGGCCTTGGAGAACGAGACCTGTGTGCCAG |
| | | GGGCAGATGGCCTGGAGGCTCCAGTGACTGAGGGGCCTGGCTCCGTAGAT |
| | | GAGAAGCTGCCTGCCCCTGAGCCCTGTGTCGGGATGTCATGTCCTCCAGG |
| | | CTGGGGCCATCTGGATGCCACCTCTGCAGGGGAGAAGGCTCCCTCCCCAT |
| | | GGGGCAGCATCAGGACGGGGGCTCAAGCTGCACACGTGTGGACCCCTGCG |
| | | GCAGGGTCGTGCTCCGTCTCCTGCGGGCGAGGTCTGATGGAGCTCCGTTT |
| | | CCTGTGCATGGACTCTGCCCTCAGGGTGCCTGTCCAGGAAGAGCTGTGTG |
| | | GCCTGGCAAGCAAGCCTGGGAGCCGGGGGGAGGTCTGCCAGGCTGTCCCG |
| | | TGCCCTGCTCGGTGGCAGTACAAGCTGGCGGCCTGCAGCGTGAGCTGTGG |
| | | GAGAGGGGTCGTGCGGAGGATCCTGTATTGTGCCCGGGCCCATGGGGAGG |
| | | ACGATGGTGAGGAGATCCTGTTGGACACCCAGTGCCAGGGGCTGCCTCGC |
| | | CCGGAACCCCAGGAGGCCTGCAGCCTGGAGCCCTGCCCACCTAGGTGGAA |
| | | AGTCATGTCCCTTGGCCCATGTTCGGCCAGCTGTGGCCTTGGCACTGCTA |
| | | GACGCTCGGTGGCCTGTGTGCAGCTCGACCAAGGCCAGGACGTGGAGGTG |
| | | GACGAGGCGGCCTGTGCGGCGCTGGTGCGGCCCGAGGCCAGTGTCCCCTG |
| | | TCTCATTGCCGACTGCACCTACCGCTGGCATGTTGGCACCTGGATGGAGT |
| | | GCTCTGTTTCCTGTGGGGATGGCATCCAGCGCCGGCGTGACACCTGCCTC |
| | | GGACCCCAGGCCCAGGCGCCTGTGCCAGCTGATTTCTGCCAGCACTTGCC |
| | | CAAGCCGGTGACTGTGCGTGGCTGCTGGGCTGGGCCCTGTGTGGGACAGG |
| | | GTACGCCCAGCCTGGTGCCCCACGAAGAAGCCGCTGCTCCAGGACGGACC |
| | | ACAGCCACCCCTGCTGGTGCCTCCCTGGAGTGGTCCCAGGCCCGGGGCCT |
| | | GCTCTTCTCCCCGGCTCCCCAGCCTCGGCGGCTCCTGATTGGGCCCCAGG |
| | | AAAACTCAGTGCAGTCCAGTGCCTGTGGCAGGCAGCACCTTGAGCCAACA |
| | | GGAACCATTGACATGCGAGGCCCAGGGCAGGCAGACTGTGCAGTGGCCAT |
| | | TGGGGGGCCCCTCGGGGAGGTGGTGACCCTCCGCGTCCTTGAGAGTTCTC |
| | | TCAACTGCAGTGCGGGGGACATGTTGCTGCTTTGGGGCCGGCTCACCTGG |
| | | AGGAAGATGTGCAGGAAGCTGTTGGACATGACTTTCAGCTCCAAGACCAA |
| | | CACGCTGGTGGTGAGGCAGCGCTGGGGGGGGCCAGGAGGTGGGGTGCTGC |
| | | TGCGGTATGGGAGCCAGCTTGCTCCTGAAACCTTCTACAGAGAATGTGAC |
| | | ATGCAGCTCTTTGGGCCCTGGGGTGAAATCGTGAGCCCCTCGCTGAGTCC |
| | | AGCCACGAGTAATGCAGGGGGCTGCCGGCTCTTCATTAATGTGGCTCCGC |
| | | ACGCACGGATTGCCATCCATGCCCTGGCCACCAACATGGGCGCTGGGACC |
| | | GAGGGAGCCAATGCCAGCTACATCTTGATCCGGGACACCCACAGCTTGAG |
| | | GACCACAGCGTTCCATGGGCAGCAGGTGCTCTACTGGGAGTCAGAGAGCA |
| | | GCCAGGCTGAGATGGAGTTCAGCGAGGGCTTCCTGAAGGCTCAGGCCAGC |
| | | CTGCGGGGCCAGTACTGGACCCTCCAATCATGGGTACCGGAGATGCAGGA |
| | | CCCTCAGTCCTGGAAGGGAAAGGAAGGAACCTCTAGAGGGCCCTTCGAAC |
| | | AAAAACTCATCTCAGAAGAGGATCTGAATATGCATACCGGTCATCATCAC |
| | | CATCACCAT |
| 134 | Exemplified P1182K | ATGCACCAGCGTCACCCCCGGGCAAGATGCCCTCCCCTCTGTGTGGCCGG |
| | variant nucleotide | AATCCTTGCCTGTGGCTTTCTCCTGGGCTGCTGGGGACCCTCCCATTTCC |
| | sequence | AGCAGAGCTGTCTTCAGGCTTTGGAGCCACAGGCCGTGTCTTCTTACTTG |
| | | AGCCCTGGTGCTCCCTTAAAAGGCCGCCCTCCTTCCCCTGGCTTCCAGAG |
| | | GCAGAGGCAGAGGCAGAGGGGGGCTGCAGGCGGCATCCTACACCTGGAGC |
| | | TGCTGGTGGCCGTGGGCCCCGATGTCTTCCAGGCTCACCAGGAGGACACA |
| | | GAGCGCTATGTGCTCACCAACCTCAACATCGGGGCAGAACTGCTTCGGGA |
| | | CCCGTCCCTGGGGGCTCAGTTTCGGGTGCACCTGGTGAAGATGGTCATTC |
| | | TGACAGAGCCTGAGGGTGCTCCAAATATCACAGCCAACCTCACCTCGTCC |
| | | CTGCTGAGCGTCTGTGGGTGGAGCCAGACCATCAACCCTGAGGACGACAC |
| | | GGATCCTGGCCATGCTGACCTGGTCCTCTATATCACTAGGTTTGACCTGG |
| | | AGTTGCCTGATGGTAACCGGCAGGTGCGGGGCGTCACCCAGCTGGGGGGT |
| | | GCCTGCTCCCCAACCTGGAGCTGCCTCATTACCGAGGACACTGGCTTCGA |
| | | CCTGGGAGTCACCATTGCCCATGAGATTGGGCACAGCTTCGGCCTGGAGC |
| | | ACGACGGCGCGCCCGGCAGCGGCTGCGGCCCCAGCGGACACGTGATGGCT |
| | | TCGGACGGCGCCGCGCCCCGCGCCGGCCTCGCCTGGTCCCCCTGCAGCCG |
| | | CCGGCAGCTGCTGAGCCTGCTCAGCGCAGGACGGGCGCGCTGCGTGTGGG |
| | | ACCCGCCGCGGCCTCAACCCGGGTCCGCGGGGCACCCGCCGGATGCGCAG |
| | | CCTGGCCTCTACTACAGCGCCAACGAGCAGTGCCGCGTGGCCTTCGGCCC |
| | | CAAGGCTGTCGCCTGCACCTTCGCCAGGGAGCACCTGGATATGTGCCAGG |
| | | CCCTCTCCTGCCACACAGACCCGCTGGACCAAAGCAGCTGCAGCCGCCTC |
| | | CTCGTTCCTCTCCTGGATGGGACAGAATGTGGCGTGGAGAAGTGGTGCTC |
| | | CAAAGGTCGCTGCCGCTCCCTGGTGGAGCTGACCCCCATAGCAGCAGTGC |
| | | ATGGGCGCTGGTCTAGCTGGGGTCCCCGAAGTCCTTGCTCCCGCTCCTGC |
| | | GGAGGAGGTGTGGTCACCAGGAGGCGGCAGTGCAACAACCCCAGACCTGC |
| | | CTTTGGGGGGCGTGCATGTGTTGGTGCTGACCTCCAGGCCGAGATGTGCA |
| | | ACACTCAGGCCTGCGAGAAGACCCAGCTGGAGTTCATGTCGCAACAGTGC |
| | | GCCAGGACCGACGGCCAGCCGCTGCGCTCCTCCCCTGGGGGCGCCTCCTT |
| | | CTACCACTGGGGTGCTGCTGTACCACACAGCCAAGGGGATGCTCTGTGCA |
| | | GACACATGTGCCGGGCCATTGGCGAGAGCTTCATCATGAAGCGTGGAGAC |
| | | AGCTTCCTCGATGGGACCCGGTGTATGCCAAGTGGCCCCCGGGAGGACGG |
| | | GACCCTGAGCCTGTGTGTGTCGGGCAGCTGCAGGACATTTGGCTGTGATG |
| | | GTAGGATGGACTCCCAGCAGGTATGGGACAGGTGCCAGGTGTGTGGTGGG |
| | | GACAACAGCACGTGCAGCCCACGGAAGGGCTCTTTCACAGCTGGCAGAGC |
| | | GAGAGAATATGTCACGTTTCTGACAGTTACCCCCAACCTGACCAGTGTCT |
| | | ACATTGCCAACCACAGGCCTCTCTTCACACACTTGGCGGTGAGGATCGGA |
| | | GGGCGCTATGTCGTGGCTGGGAAGATGAGCATCTCCCCTAACACCACCTA |
| | | CCCCTCCCTCCTGGAGGATGGTCGTGTCGAGTACAGAGTGGCCCTCACCG |
| | | AGGACCGGCTGCCCCGCCTGGAGGAGATCCGCATCTGGGGACCCCTCCAG |
| | | GAAGATGCTGACATCCAGGTTTACAGGCGGTATGGCGAGGAGTATGGCAA |
| | | CCTCACCCGCCCAGACATCACCTTCACCTACTTCCAGCCTAAGCCACGGC |
| | | AGGCCTGGGTGTGGGCCGCTGTGCGTGGGCCCTGCTCGGTGAGCTGTGGG |
| | | GCAGGGCTGCGCTGGGTAAACTACAGCTGCCTGGACCAGGCCAGGAAGGA |
| | | GTTGGTGGAGACTGTCCAGTGCCAAGGGAGCCAGCAGCCACCAGCGTGGC |
| | | CAGAGGCCTGCGTGCTCGAACCCTGCCCTCCCTACTGGGCGGTGGGAGAC |
| | | TTCGGCCCATGCAGCGCCTCCTGTGGGGGTGGCCTGGGGGAGCGGCCAGT |
| | | GCGCTGCGTGGAGGCCCAGGGCAGCCTCCTGAAGACATTGCCCCCAGCCC |
| | | GGTGCAGAGCAGGGGCCCAGCAGCCAGCTGTGGCGCTGGAAACCTGCAAC |
| | | CCCCAGCCCTGCCCTGCCAGGTGGGAGGTGTCAGAGCCCAGCTCATGCAC |
| | | ATCAGCTGGTGGAGCAGGCCTGGCCTTGGAGAACGAGACCTGTGTGCCAG |
| | | GGGCAGATGGCCTGGAGGCTCCAGTGACTGAGGGGCCTGGCTCCGTAGAT |
| | | GAGAAGCTGCCTGCCCCTGAGCCCTGTGTCGGGATGTCATGTCCTCCAGG |
| | | CTGGGGCCATCTGGATGCCACCTCTGCAGGGGAGAAGGCTCCCTCCCCAT |
| | | GGGGCAGCATCAGGACGGGGGCTCAAGCTGCACACGTGTGGACCCCTGCG |
| | | GCAGGGTCGTGCTCCGTCTCCTGCGGGCGAGGTCTGATGGAGCTCCGTTT |
| | | CCTGTGCATGGACTCTGCCCTCAGGGTGCCTGTCCAGGAAGAGCTGTGTG |
| | | GCCTGGCAAGCAAGCCTGGGAGCCGGGGGGAGGTCTGCCAGGCTGTCCCG |
| | | TGCCCTGCTCGGTGGCAGTACAAGCTGGCGGCCTGCAGCGTGAGCTGTGG |
| | | GAGAGGGGTCGTGCGGAGGATCCTGTATTGTGCCCGGGCCCATGGGGAGG |
| | | ACGATGGTGAGGAGATCCTGTTGGACACCCAGTGCCAGGGGCTGCCTCGC |
| | | CCGGAACCCCAGGAGGCCTGCAGCCTGGAGCCCTGCCCACCTAGGTGGAA |
| | | AGTCATGTCCCTTGGCCCATGTTCGGCCAGCTGTGGCCTTGGCACTGCTA |
| | | GACGCTCGGTGGCCTGTGTGCAGCTCGACCAAGGCCAGGACGTGGAGGTG |
| | | GACGAGGCGGCCTGTGCGGCGCTGGTGCGGCCCGAGGCCAGTGTCCCCTG |
| | | TCTCATTGCCGACTGCACCTACCGCTGGCATGTTGGCACCTGGATGGAGT |
| | | GCTCTGTTTCCTGTGGGGATGGCATCCAGCGCCGGCGTGACACCTGCCTC |
| | | GGACCCCAGGCCCAGGCGCCTGTGCCAGCTGATTTCTGCCAGCACTTGCC |
| | | CAAGCCGGTGACTGTGCGTGGCTGCTGGGCTGGGCCCTGTGTGGGACAGG |
| | | GTACGCCCAGCCTGGTGCCCCACGAAGAAGCCGCTGCTCCAGGACGGACC |
| | | ACAGCCACCCCTGCTGGTGCCTCCCTGGAGTGGTCCCAGGCCCGGGGCCT |
| | | GCTCTTCTCCCCGGCTCCCCAGCCTCGGCGGCTCCTGCCCGGGAAGCAGG |
| | | AAAACTCAGTGCAGTCCAGTGCCTGTGGCAGGCAGCACCTTGAGCCAACA |
| | | GGAACCATTGACATGCGAGGCCCAGGGGAGGCAGACTGTGCAGTGGCCAT |
| | | TGGGCGGCCCCTCGGGGAGGTGGTGACCCTCCGCGTCCTTGAGAGTTCTC |
| | | TCAACTGCAGTGCGGGGGACATGTTGCTGCTTTGGGGCCGGCTCACCTGG |
| | | AGGAAGATGTGCAGGAAGCTGTTGGACATGACTTTCAGCTCCAAGACCAA |
| | | CACGCTGGTGGTGAGGCAGCGCTGCGGGGGGCCAGGAGGTGGGGTGCTGC |
| | | TGCGGTATGGGAGCCAGCTTGCTCCTGAAACCTTCTACAGAGAATGTGAC |
| | | ATGCAGCTCTTTGGGCCCTGGGGTGAAATCGTGAGCCCCTCGCTGAGTCC |
| | | AGCCACGAGTAATGCAGGGGGCTGCCGGCTCTTCATTAATGTGGCTCCGC |
| | | ACGCACGGATTGCCATCCATGCCCTGGCCACCAACATGGGCGCTGGGACC |
| | | GAGGGAGCCAATGCCAGCTACATCTTGATCCGGGACACCCACAGCTTGAG |
| | | GACCACAGCGTTCCATGGGCAGCAGGTGCTCTACTGGGAGTCAGAGAGCA |
| | | GCCAGGCTGAGATGGAGTTCAGCGAGGGCTTCCTGAAGGCTCAGGCCAGC |
| | | CTGCGGGGCCAGTACTGGACCCTCCAATCATGGGTACCGGAGATGCAGGA |
| | | CCCTCAGTCCTGGAAGGGAAAGGAAGGAACCTCTAGAGGGCCCTTCGAAC |
| | | AAAAACTCATCTCAGAAGAGGATCTGAATATGCATACCGGTCATCATCAC |
| | | CATCACCAT |
| 135 | Exemplified P11821 | ATGCACCAGCGTCACCCCCGGGCAAGATGCCCTCCCCTCTGTGTGGCCGG |
| | variant nucleotide | AATCCTTGCCTGTGGCTTTCTCCTGGGCTGCTGGGGACCCTCCCATTTCC |
| | sequence | AGCAGAGCTGTCTTCAGGCTTTGGAGCCACAGGCCGTGTCTTCTTACTTG |
| | | AGCCCTGGTGCTCCCTTAAAAGGCCGCCCTCCTTCCCCTGGCTTCCAGAG |
| | | GCAGAGGCAGAGGCAGAGGGGGGCTGCAGGCGGCATCCTACACCTGGAGC |
| | | TGCTGGTGGCCGTGGGCCCCGATGTCTTCCAGGCTCACCAGGAGGACACA |
| | | GAGCGCTATGTGCTCACCAACCTCAACATCGGGGCAGAACTGCTTCGGGA |
| | | CCCGTCCCTGGGGGCTCAGTTTCGGGTGCACCTGGTGAAGATGGTCATTC |
| | | TGACAGAGCCTGAGGGTGCTCCAAATATCACAGCCAACCTCACCTCGTCC |
| | | CTGCTGAGCGTCTGTGGGTGGAGCCAGACCATCAACCCTGAGGACGACAC |
| | | GGATCCTGGCCATGCTGACCTGGTCCTCTATATCACTAGGTTTGACCTGG |
| | | AGTTGCCTGATGGTAACCGGCAGGTGCGGGGCGTCACCCAGCTGGGCGGT |
| | | GCCTGCTCCCCAACCTGGAGCTGCCTCATTACCGAGGACACTGGCTTCGA |
| | | CCTGGGAGTCACCATTGCCCATGAGATTGGGCACAGCTTCGGCCTGGAGC |
| | | ACGACGGCGCGCCCGGCAGCGGCTGCGGCCCCAGGGGACACGTGATGGCT |
| | | TCGGACGGCGCCGCGCCCCGCGCCGGCCTCGCCTGGTCCCCCTGCAGCCG |
| | | CCGGCAGCTGCTGAGCCTGCTCAGCGCAGGACGGGCGCGCTGCGTGTGGG |
| | | ACCCGCCGCGGCCTCAACCCGGGTCCGCGGGGCACCCGCCGGATGCGCAG |
| | | CCTGGCCTCTACTACAGCGCCAACGAGCAGTGCCGCGTGGCCTTCGGCCC |
| | | CAAGGCTGTCGCCTGCACCTTCGCCAGGGAGCACCTGGATATGTGCCAGG |
| | | CCCTCTCCTGCCACACAGACCCGCTGGACCAAAGCAGCTGCAGCCGCCTC |
| | | CTCGTTCCTCTCCTGGATGGGACAGAATGTGGCGTGGAGAAGTGGTGCTC |
| | | CAAAGGTCGCTGCCGCTCCCTGGTGGAGCTGACCCCCATAGCAGCAGTGC |
| | | ATGGGCGCTGGTCTAGCTGGGGTCCCCGAAGTCCTTGCTCCCGCTCCTGC |
| | | GGAGGAGGTGTGGTCACCAGGAGGCGGCAGTGCAACAACCCCAGACCTGC |
| | | CTTTGGGGGGCGTGCATGTGTTGGTGCTGACCTCCAGGCCGAGATGTGCA |
| | | ACACTCAGGCCTGCGAGAAGACCCAGCTGGAGTTCATGTCGCAACAGTGC |
| | | GCCAGGACCGACGGCCAGCCGCTGCGCTCCTCCCCTGGCGGCGCCTCCTT |
| | | CTACCACTGGGGTGCTGCTGTACCACACAGCCAAGGGGATGCTCTGTGCA |
| | | GACACATGTGCCGGGCCATTGGCGAGAGCTTCATCATGAAGCGTGGAGAC |
| | | AGCTTCCTCGATGGGACCCGGTGTATGCCAAGTGGCCCCCGGGAGGACGG |
| | | GACCCTGAGCCTGTGTGTGTCGGGCAGCTGCAGGACATTTGGCTGTGATG |
| | | GTAGGATGGACTCCCAGCAGGTATGGGACAGGTGCCAGGTGTGTGGTGGG |
| | | GACAACAGCACGTGCAGCCCACGGAAGGGCTCTTTCACAGCTGGCAGAGC |
| | | GAGAGAATATGTCACGTTTCTGACAGTTACCCCCAACCTGACCAGTGTCT |
| | | ACATTGCCAACCACAGGCCTCTCTTCACACACTTGGCGGTGAGGATCGGA |
| | | GGGCGCTATGTCGTGGCTGGGAAGATGAGCATCTCCCCTAACACCACCTA |
| | | CCCCTCCCTCCTGGAGGATGGTCGTGTCGAGTACAGAGTGGCCCTCACCG |
| | | AGGACCGGCTGCCCCGCCTGGAGGAGATCCGCATCTGGGGACCCCTCCAG |
| | | GAAGATGCTGACATCCAGGTTTACAGGCGGTATGGCGAGGAGTATGGCAA |
| | | CCTCACCCGCCCAGACATCACCTTCACCTACTTCCAGCCTAAGCCACGGC |
| | | AGGCCTGGGTGTGGGCCGCTGTGCGTGGGCCCTGCTCGGTGAGCTGTGGG |
| | | GCAGGGCTGCGCTGGGTAAACTACAGCTGCCTGGACCAGGCCAGGAAGGA |
| | | GTTGGTGGAGACTGTCCAGTGCCAAGGGAGCCAGCAGCCACCAGCGTGGC |
| | | CAGAGGCCTGCGTGCTCGAACCCTGCCCTCCCTACTGGGCGGTGGGAGAC |
| | | TTCGGCCCATGCAGCGCCTCCTGTGGGGGTGGCCTGGGGGAGCGGCCAGT |
| | | GCGCTGCGTGGAGGCCCAGGGCAGCCTCCTGAAGACATTGCCCCCAGCCC |
| | | GGTGCAGAGCAGGGGCCCAGCAGCCAGGTGTGGCGCTGGAAACCTGCAAC |
| | | CCCCAGCCCTGCCCTGCCAGGTGGGAGGTGTCAGAGCCCAGCTCATGCAC |
| | | ATCAGCTGGTGGAGCAGGCCTGGCCTTGGAGAACGAGACCTGTGTGCCAG |
| | | GGGCAGATGGCCTGGAGGCTCCAGTGACTGAGGGGCCTGGCTCCGTAGAT |
| | | GAGAAGCTGCCTGCCCCTGAGCCCTGTGTCGGGATGTCATGTCCTCCAGG |
| | | CTGGGGCCATCTGGATGCCACCTCTGCAGGGGAGAAGGCTCCCTCCCCAT |
| | | GGGGCAGCATCAGGACGGGGGCTCAAGCTGCACACGTGTGGACCCCTGCG |
| | | GCAGGGTCGTGCTCCGTCTCCTGCGGGCGAGGTCTGATGGAGCTCCGTTT |
| | | CCTGTGCATGGACTCTGCCCTCAGGGTGCCTGTCCAGGAAGAGCTGTGTG |
| | | GCCTGGCAAGCAAGCCTGGGAGCCGGCGGGAGGTCTGCCAGGCTGTCCCG |
| | | TGCCCTGCTCGGTGGCAGTACAAGCTGGCGGCCTGCAGCGTGAGCTGTGG |
| | | GAGAGGGGTCGTGCGGAGGATCCTGTATTGTGCCCGGGCCCATGGGGAGG |
| | | ACGATGGTGAGGAGATCCTGTTGGACACCCAGTGCCAGGGGCTGCCTCGC |
| | | CCGGAACCCCAGGAGGCCTGCAGCCTGGAGCCCTGCCCACCTAGGTGGAA |
| | | AGTCATGTCCCTTGGCCCATGTTCGGCCAGCTGTGGCCTTGGCACTGCTA |
| | | GACGCTCGGTGGCCTGTGTGCAGCTCGACCAAGGCCAGGACGTGGAGGTG |
| | | GACGAGGCGGCCTGTGCGGCGCTGGTGCGGCCCGAGGCCAGTGTCCCCTG |
| | | TCTCATTGCCGACTGCACCTACCGCTGGCATGTTGGCACCTGGATGGAGT |
| | | GCTCTGTTTCCTGTGGGGATGGCATCCAGCGCCGGCGTGACACCTGCCTC |
| | | GGACCCCAGGCCCAGGCGCCTGTGCCAGCTGATTTCTGCCAGCACTTGCC |
| | | CAAGCCGGTGACTGTGCGTGGCTGCTGGGCTGGGCCCTGTGTGGGACAGG |
| | | GTACGCCCAGCCTGGTGCCCCACGAAGAAGCCGCTGCTCCAGGACGGACC |
| | | ACAGCCACCCCTGCTGGTGCCTCCCTGGAGTGGTCCCAGGCCCGGGGCCT |
| | | GCTCTTCTCCCCGGCTCCCCAGCCTCGGCGGCTCCTGCCCGGGATTCAGG |
| | | AAAACTCAGTGCAGTCCAGTGCCTGTGGCAGGCAGCACCTTGAGCCAACA |
| | | GGAACCATTGACATGCGAGGCCCAGGGCAGGCAGACTGTGCAGTGGCCAT |
| | | TGGGCGGCCCCTCGGGGAGGTGGTGACCCTCCGCGTCCTTGAGAGTTCTC |
| | | TCAACTGCAGTGCGGGGGACATGTTGCTGCTTTGGGGCCGGCTCACCTGG |
| | | AGGAAGATGTGCAGGAAGCTGTTGGACATGACTTTCAGCTCCAAGACCAA |
| | | CACGCTGGTGGTGAGGCAGCGCTGGGGGGGGCCAGGAGGTGGGGTGCTGC |
| | | TGCGGTATGGGAGCCAGCTTGCTCCTGAAACCTTCTACAGAGAATGTGAC |
| | | ATGCAGCTCTTTGGGCCCTGGGGTGAAATCGTGAGCCCCTCGCTGAGTCC |
| | | AGCCACGAGTAATGCAGGGGGCTGCCGGCTCTTCATTAATGTGGCTCCGC |
| | | ACGCACGGATTGCCATCCATGCCCTGGCCACCAACATGGGCGCTGGGACC |
| | | GAGGGAGCCAATGCCAGCTACATCTTGATCCGGGACACCCACAGCTTGAG |
| | | GACCACAGCGTTCCATGGGCAGCAGGTGCTCTACTGGGAGTCAGAGAGCA |
| | | GCCAGGCTGAGATGGAGTTCAGCGAGGGCTTCCTGAAGGCTCAGGCCAGC |
| | | CTGCGGGGCCAGTACTGGACCCTCCAATCATGGGTACCGGAGATGCAGGA |
| | | CCCTCAGTCCTGGAAGGGAAAGGAAGGAACCTCTAGAGGGCCCTTCGAAC |
| | | AAAAACTCATCTCAGAAGAGGATCTGAATATGCATACCGGTCATCATCAC |
| | | CATCACCAT |
| 136 | Human ADAMTS13 | KAAPGRTTATPAGASLEWSQARGLLFSPAPQPRRLLPGP |
| | A1144K L3 | |
| | subregion | |
| 137 | Human ADAMTS13 | AKAPGRTTATPAGASLEWSQARGLLFSPAPQPRRLLPGP |
| | A1145K L3 | |
| | subregion | |
| 138 | Human ADAMTS13 | AAKPGRTTATPAGASLEWSQARGLLFSPAPQPRRLLPGP |
| | A1146K L3 | |
| | subregion | |
| 139 | Human ADAMTS13 | AAAKGRTTATPAGASLEWSQARGLLFSPAPQPRRLLPGP |
| | P1147K L3 | |
| | subregion | |
| 140 | Human ADAMTS13 | AAAPGRTTATKAGASLEWSQARGLLFSPAPQPRRLLPGP |
| | P1154K L3 | |
| | subregion | |
| 141 | Human ADAMTS13 | AAAPGRTTATPAGASLEWSQARGLLFSKAPQPRRLLPGP |
| | P1171K L3 | |
| | subregion | |
| 142 | Human ADAMTS13 | AAAPGRTTATPAGASLEWSQARGLLFSPAKQPRRLLPGP |
| | P1173K L3 | |
| | subregion | |
| 143 | Human ADAMTS13 | AAAPGRTTATPAGASLEWSQARGLLFSPAPQKRRLLPGP |
| | P1175K L3 | |
| | subregion | |
| 144 | Human ADAMTS13 | AAAPGRTTATPAGASLEWSQARGLLFSPAPQPRRLLKGP |
| | P1180K L3 | |
| | subregion | |
| 145 | Human ADAMTS13 | AAAPGRTTATPAGASLEWSQARGLLFSPAPQPRRLLPGK |
| | P1182K L3 | |
| | subregion | |
| 146 | Human ADAMTS13 | IAAPGRTTATPAGASLEWSQARGLLFSPAPQPRRLLPGP |
| | A11441 L3 subregion | |
| 147 | Human ADAMTS13 | AIAPGRTTATPAGASLEWSQARGLLFSPAPQPRRLLPGP |
| | A11451 L3 subregion | |
| 148 | Human ADAMTS13 | AAIPGRTTATPAGASLEWSQARGLLFSPAPQPRRLLPGP |
| | A11461 L3 subregion | |
| 149 | Human ADAMTS13 | AAAIGRTTATPAGASLEWSQARGLLFSPAPQPRRLLPGP |
| | P11471 L3 subregion | |
| 150 | Human ADAMTS13 | AAAPGRTTATIAGASLEWSQARGLLFSPAPQPRRLLPGP |
| | P11541 L3 subregion | |
| 151 | Human ADAMTS13 | AAAPGRTTATPAGASLEWSQARGLLFSIAPQPRRLLPGP |
| | P11711 L3 subregion | |
| 152 | Human ADAMTS13 | AAAPGRTTATPAGASLEWSQARGLLFSPAIQPRRLLPGP |
| | P11731 L3 subregion | |
| 153 | Human ADAMTS13 | AAAPGRTTATPAGASLEWSQARGLLFSPAPQIRRLLPGP |
| | P11751 L3 subregion | |
| 154 | Human ADAMTS13 | AAAPGRTTATPAGASLEWSQARGLLFSPAPQPRRLLIGP |
| | P11801 L3 subregion | |
| 155 | Human ADAMTS13 | AAAPGRTTATPAGASLEWSQARGLLFSPAPQPRRLLPGI |
| | P11821 L3 subregion | |
| 156 | Human ADAMTS13 | X₁X₂X₃X₄GRTTATX₅AGASLEWSQARGLLFSX₆AX₇QX₈RRLLX₉GX₁₀ |
| | variant L3 | wherein X₁ = A, K, I, or V, X₂ = A, K, I, or V, |
| | subregion | X₃ = A, K, I, or V, X₄ = P, K, I, or V, |
| | consensus 2 | X₅ = P, K, I, or V, |
| | | X₆ = P, K, I, or V, X₇ = P, K, I, or V, |
| | | X₈ = P, K, I, or V, X₉ = P, K, I, or V and |
| | | X₁₀ = P, K, I, |
| | | or V |

### SUMMARY OF THE FIGURES

[0046] Embodiments and experiments illustrating the principles of the present disclosure will now be discussed with reference to the accompanying figures in which:

[0047] FIG. 1A. In vitro activities of ADAMTS13 linker 3 variants. The proteolytic activities of wild type (wt) ADAMTS13, the gain of function (GoF) ADAMTS13 variant and linker 3 variants were determined by FRETS-VWF73 assay in both the absence (−) and presence (+) of the activating VWF-D4CK domain fragment. All activities are presented relative to the basal activity of wtADAMTS13 (100%).

[0048] FIG. 1B. In vitro activities of further ADAMTS13 linker 3 variants. The proteolytic activities of wild type (wt) ADAMTS13 and the indicated linker 3 variants were determined by FRETS-VWF73 assay in both the absence (hollow bars) and presence (textured bars) of the activating VWF-D4CK domain fragment. All activities are presented relative to the basal activity of wtADAMTS13 (100%), as denoted by a dotted line.

[0049] FIG. 2. The VWF-mediated capture of platelets under arterial shear stress was determined in the presence of either wtADAMTS13, GoF ADAMTS13 or the linker 3 variant A1144V ADAMTS13 at a range of concentrations. For comparison, the results of VWF negative controls are also shown.

[0050] FIG. 3. Restoration of rCBF to the MCA territory by the A1144V ADAMTS13 variant (caADAMTS13) administered 1 hour after MCA occlusion. A, raw laser speckle contrast images acquired at 0, 30 and 60 minutes post-injection of either vehicle control, N-acetyl-cysteine (NAC), wtADAMTS13 or caADAMTS13. Regions of interest (ROI), in the MCA territories of the contralateral (contra) and ipsilateral (ipsi) hemispheres, were used for rCBF quantification.

[0051] FIG. 4. Flux values for contralateral and ipsilateral ROIs were determined at 1 minute intervals for 5 minutes prior to injection and for 60 minutes post-injection. Traces shown are representative measurements from a single animal in each treatment group.

[0052] FIG. 5. The change in average flux ratio (ipsi/contra) over the course of the experiment was determined for each treatment group. An arbitrary flux ratio value of 0.5 was used to confirm successful MCA occlusion and as the point at which recanalisation was achieved in treated animals (*). For comparison the flux ratio of a sham (i.e. non-stroked) animal is also shown.

[0053] FIG. 6. Impact of treatments on lesion volumes determined 24 hours post-occlusion. Lesion volumes were measured using cresyl violet stained brain sections. For comparison, sections from a sham animal, in which FeCl₃ was not applied to the MCA, are also shown.

[0054] FIG. 7. Lesion volumes in each treatment group were compared to the vehicle treated group using an unpaired t-test with Welch's correction (* p<0.01). In this case sham animals are those excluded from the study due to lack of stable MCA occlusion. The % increase, between 0 and 60 minutes after injection, in flux ratio between the ipsilateral and contralateral ROIs was also compared between vehicle and each treatment group (* p<0.01).

[0055] FIG. 8. A significant negative correlation was observed between the increase in flux ratio and lesion volume across all groups. Animals treated with caADAMTS13 are highlighted in red.

[0056] FIG. 9. Haematoxylin and eosin stained brain sections were used to identify evidence of haemorrhagic transformation 24 hours post-treatment.

[0057] FIG. 10. Impact of treatments on residual thrombus content at site of FeCl₃ application 24 hours post-occlusion. Whole brain sections were stained by immunofluorescence to visualise VWF and fibrin(ogen). Higher magnification of marked ROIs. Areas of microvascular VWF-platelet deposition are shown by white arrows.

[0058] FIG. 11. The total deposition of VWF and fibrin in the entire region adjacent to the MCA was quantified and compared between vehicle and treatment groups using an unpaired t-test with Welch's correction (*<0.05, **p<0.01). Sham animals are those in which FeCl₃ was not applied to the MCA.

[0059] FIG. 12. Male CD1 mice, aged 13-14 weeks, were infected with Streptococcus pneumoniae using an ascending infectious challenge over a 6 day period. On day 8 they were treated with either vehicle (no treatment) or A1144V ADAMTS13 (caADAMTS13) by tail vein injection. This was performed in mice with ongoing infection (A) and in mice in which the infection was resolved by a single sub-cutaneous injection of amoxicillin (B). On day 18 3D MGE data was acquired two hours following intravenous administration of α-Von Willebrand Factor (VWF)-conjugated MPIO particles. MGE data was fit using a mono-exponential model to estimate R2* maps. Whole brain masks were applied and values of total R2* were derived from the entire brain volume (C). The reactivity of VWF (VWF:CBA) in the plasma of these experimental animals (relative to that of mock infected control animals) was also determined (D). Untreated and amoxicillin treated mice show higher levels of binding of α-VWF MPIO particles (higher R2*) compared to mock infected animals, indicating increased endothelial activation in the cerebral vasculature. This is accompanied by increased levels of reactive VWF species in the plasma. Administration of caADAMTS13 significantly reduces levels of VWF detected in the cerebral vasculature and plasma in animals with resolved or ongoing infection. Treatment groups were compared as indicated using an unpaired t-test with Welch's correction (*<0.05, **p<0.01, ****p<0.001).

### DETAILED DESCRIPTION OF THE DISCLOSURE

[0060] Aspects and embodiments of the present disclosure will now be discussed with reference to the accompanying figures. Further aspects and embodiments will be apparent to those skilled in the art. All documents mentioned in this text are incorporated herein by reference.

[0061] The present disclosure is based on the identification by the inventors that the linker 3 region of ADAMTS13 can be modified to improve the therapeutic properties of the protein. The inventors have generated multiple ADAMTS13 variants with amino acid substitutions in the linker 3 region that have improved characteristics compared to wildtype ADAMTS13.

[0062] The variants of the present disclosure have a number of advantages over wildtype ADAMTS13, recombinant wildtype ADAMTS13, and the known GoF ADAMTS13 variant, including: the lack of requirement for substrate-induced activation, broadened substrate specificity, and higher enzymatic activity. The variants of the present disclosure have higher proteolytic activity compared to wildtype ADAMTS13 and the known GoF ADAMTS13 variant. Variants have been shown to have efficacy at lower doses compared to wildtype ADAMTS13 and the known GoF ADAMTS13 variant. Additionally, unlike the known GoF ADAMTS13 variant, the variants of the present disclosure have a fully functional spacer exosite and remain in the optimally activated state.

[0063] The only approved treatment for Acute Ischaemic Stroke (AIS) is recombinant tissue plasminogen activator (rt-PA), however the use of rt-PA increases the risk of intracerebral haemorrhage in up to 7% of AIS patients (Yaghi et al. 2017). The risk of haemorrhage rises proportionally with stroke severity and delay in administration (Whiteley et al. 2016). Crucially, the inventors and others have found no evidence of haemorrhagic transformation after treatment with either wildtype ADAMTS13 or ADAMTS13 variants in murine models of AIS (Denorme et al. 2016; Nakano et al. 2015). In a murine model of haemorrhagic stroke, ADAMTS13 administration has no effect on bleeding and may, in fact, be of therapeutic potential in this condition (Zhao et al. 2009).

### General Definitions

[0064] As used herein, a “fragment”, “variant” or “homologue” of a given protein may optionally be characterised as having at least 40%, preferably one of 45%, 50%, 55%, 60%, 70%, 75%, 80%, 85%, 90%, 91%, 92%, 93%, 94%, 95%, 96%, 97%, 98%, 99% or 100% amino acid sequence identity to the amino acid sequence of the reference protein. Fragments, variants, isoforms and homologues of a reference protein may be characterised by the ability to perform a function performed by the reference protein.

[0065] As used herein, “sequence identity” refers to the percent of nucleotides/amino acid residues in a subject sequence that are identical to nucleotides/amino acid residues in a reference sequence, after aligning the sequences and, if necessary, introducing gaps, to achieve the maximum percent sequence identity between the sequences. Pairwise and multiple sequence alignment for the purpose of determining percent identity between two or more amino acid or nucleic acid sequences can be achieved in various ways known to a person of skill in the art, for instance, using publicly available computer software such as ClustalOmega (Söding, J. 2005, Bioinformatics 21, 951-960), T-coffee (Notredame et al. 2000, J. Mol. Biol. (2000) 302, 205-217), Kalign (Lassmann and Sonnhammer 2005, BMC Bioinformatics, 6(298)) and MAFFT (Katoh and Standley 2013, Molecular Biology and Evolution, 30(4) 772-780) software. When using such software, the default parameters, e.g. for gap penalty and extension penalty, are preferably used.

[0066] A “variant” generally refers to a protein having an amino acid sequence comprising one or more amino acid substitutions, insertions, deletions or other modifications relative to the amino acid sequence of the reference protein, but retaining a considerable degree of sequence identity (e.g. at least 40%) to the amino acid sequence of the reference protein. An “isoform” generally refers to a variant of the reference protein expressed by the same species as the species of the reference protein. A “homologue” generally refers to a variant of the reference protein produced by a different species as compared to the species of the reference protein.

[0067] A “fragment” of a reference protein may be of any length (by number of amino acids), although may optionally be at least 25% of the length of the reference protein (that is, the protein from which the fragment is derived) and may have a maximum length of one of 50%, 75%, 80%, 85%, 90%, 91%, 92%, 93%, 94%, 95%, 96%, 97%, 98%, or 99% of the length of the reference protein.

[0068] Regions and positions of a given polypeptide/amino acid sequence which “corresponding to” those of a reference amino acid sequence can be identified by sequence alignment, which can be performed e.g. using sequence alignment software such as ClustalOmega (Söding, J. 2005, Bioinformatics 21, 951-960). A region of a given polypeptide/amino acid sequence which corresponds to a region of a reference an amino acid sequence may have at least 60%, preferably one of 70%, 75%, 80%, 85%, 90%, 91%, 92%, 93%, 94%, 95%, 96%, 97%, 98%, 99% or 100% amino acid sequence identity to the region of the reference an amino acid sequence to which it corresponds. By way of illustration, the amino acid sequence shown in SEQ ID NO:48 corresponds to positions 1131 to 1190 of SEQ ID NO:1. By way of further illustration, the alanine residue at position 14 of SEQ ID NO:48 corresponds to positions 1144 of SEQ ID NO:1.

### ADAMTS13 and Von Willebrand Factor (VWF)

[0069] ADAMTS13 (a disintegrin-like and metalloprotease with thrombospondin type 1 motif 13) is identified by UniProtKB Q76LX8. Alternative splicing of mRNA encoded by the human ADAMTS13 gene yields four isoforms: isoform 1 (SEQ ID NO:1); isoform 2 (SEQ ID NO:2) lacking positions 1135-1190 relative to isoform 1; isoform 3 (SEQ ID NO:3) lacking positions 275-305 and 1135-1190 relative to isoform 1; and isoform 4 (SEQ ID NO:4) lacking positions 2-329 and 693-1427 relative to isoform 1, and having a variant sequence at the positions relative to positions 258-692 of isoform 1.

[0070] The structure and function of ADAMTS13 Is reviewed e.g. In Chen et al., Front Neurol. (2019) 10: 772, which is hereby incorporated by reference in its entirety. ADAMTS13 is a 1,427 amino acid metalloprotease comprising: a signal peptide (SEQ ID NO:5), a short propeptide domain (SEQ ID NO:6), a metalloprotease domain (SEQ ID NO:13), a disintegrin-like domain (SEQ ID NO:14), a thrombospondin-type 1 (TSP1) repeat domain (SEQ ID NO:15), a cysteine-rich domain (SEQ ID NO:16), a spacer domain (SEQ ID NO:17), seven further TSP1 repeat domains (SEQ ID NOs:18 to 24), and two CUB domains (SEQ ID NOs:25 and 26).

[0071] ADAMTS13 Is the cleaving protease of von Willebrand factor (VWF), a key factor in thrombus formation. The biological breakdown (catabolism) of VWF (e.g. within endovascular platelet aggregates) is largely mediated by the enzyme ADAMTS13.

[0072] VWF is identified by UniProtKB P04275. Alternative splicing of mRNA encoded by the human VWF gene yields two isoforms: isoform 1 (SEQ ID NO:27); Isoform 2 (SEQ ID NO:28) having variant sequences at the positions corresponding to positions 1-18 and 220-314 of isoform 1, and lacking positions 315-2813 relative to isoform 1.

[0073] The structure and function of VWF is described e.g. in Bharati and Prashanth, Indian J Pharm Sci. (2011) 73(1): 7-16 and Zhou et al., Blood. (2012) 120(2): 449-458, both of which are hereby incorporated by reference in their entirety. The protein encoded by VWF comprises a signal peptide (SEQ ID NO-29), von Willebrand antigen 2 (SEQ ID NO:31; a propeptide) and the mature von Willebrand factor (SEQ ID NO:32).

[0074] Von Willebrand antigen 2 comprises VWFD1, TIL1, VWFD2 and TIL2 domains (SEQ ID NOs:33 to 36). Mature VWF comprises TIL3, VWFD3, TIL4, VWFA1, VWFA2, VWFA3, VWFD4, VWFC1, VWFC2, VWFC3 and CTCK domains (SEQ ID NOs:37 to 47).

[0075] VWF is typically expressed as a large multimeric glycoprotein complexes which are released by endothelial cells in the form of ultra-large multimers (UL-VWF) of varying sizes, having molecular weights of up to 20,000 kDa.

[0076] The metalloprotease domain of ADAMTS13 is responsible for recognition and cleavage of VWF, at the peptide bond formed between positions Y1605 and M1606 (numbering relative to SEQ ID N027), within the VWFA2 domain of VWF. The region of ADAMTS13 comprising the disintegrin-like domain, TSP1 repeat 1, the cysteine-rich domain and the spacer domain is implicated in the binding of ADAMTS13 to the VWFA2 domain of VWF. The region of ADAMTS13 comprising TSP1 repeats 5 to 8 and CUB domains 1 and 2 is implicated in the binding of ADAMTS13 to the region of VWF comprising VWFD4, VWFC1, VWFC2, VWFC3 and CTCK domains.

[0077] ADAMTS13-mediated cleavage of VWF is crucial for blood homeostasis. VWF plays a major role in blood coagulation. It binds to other proteins, in particular factor VIII, and it is implicated in platelet adhesion at wound sites. High levels of VWF can lead to diseases such as stroke as well as other thrombotic disorders.

[0078] Dysfunction of ADAMTS13-mediated cleavage of VWF leads to VWF accumulation and adhesion of platelets, resulting in thrombosis and inflammation. In pathologic states such as thrombotic thrombocytopenic purpura (TTP) and other thrombotic microangiopathies (TMAs), VWF binds to the endothelium and forms large multimers. As the anchored VWF chains grow, they provide a greater surface area to bind circulating platelets (PLTs), generating unique thrombi characteristic of TTP. This results in microvasculature thrombosis, obstruction of blood flow, and ultimately tissue and organ damage. TTP and TMAs can arise e.g. as a consequence of autoimmune responses towards ADAMTS13, or as a result of ADAMTS13 deficiency.

[0079] In this specification “ADAMTS13” refers to ADAMTS13 from any species and includes ADAMTS13 isoforms, fragments, variants or homologues from any species.

[0080] In some embodiments, the ADAMTS13 is ADAMTS13 from a mammal (e.g. a primate (rhesus, cynomolgous, or human) and/or a rodent (e.g. rat or murine) ADAMTS13). Isoforms, fragments, variants or homologues of ADAMTS13 may optionally be characterised as having at least 70%, preferably one of 80%, 85%, 90%, 91%, 92%, 93%, 94%, 95%, 96%, 97%, 98%, 99% or 100% amino acid sequence identity to the amino acid sequence of an immature or mature ADAMTS13 isoform from a given species, e.g. human. In preferred embodiments the ADAMTS13 is a human ADAMTS13 isoform (e.g. isoform 1, 2, 3 or 4).

[0081] Isoforms, fragments, variants or homologues may optionally be functional isoforms, fragments, variants or homologues, e.g. having a functional property/activity of the reference ADAMTS13 (e.g. human ADAMTS13 isoform 1), as determined by analysis by a suitable assay for the functional property/activity. For example, an isoform, fragment, variant or homologue of ADAMTS13 may display association with and/or cleavage of human VWF.

[0082] In some embodiments, the ADAMTS13 comprises, or consists of, an amino acid sequence having at least 70%, preferably one of 80%, 85%, 90%, 91%, 92%, 93%, 94%, 95%, 96%, 97%, 98%, 99% or 100% amino acid sequence identity to SEQ ID NO:1, 2, 3, 4, 7, 8, 9, 10, 11 or 12.

[0083] In this specification “VWF” refers to VWF from any species and includes VWF isoforms, fragments, variants or homologues from any species.

[0084] In some embodiments, the VWF is VWF from a mammal (e.g. a primate (rhesus, cynomolgous, or human) and/or a rodent (e.g. rat or murine) VWF). Isoforms, fragments, variants or homologues of VWF may optionally be characterised as having at least 70%, preferably one of 80%, 85%, 90%, 91%, 92%, 93%, 94%, 95%, 96%, 97%, 98%, 99% or 100% amino acid sequence identity to the amino acid sequence of an immature or mature VWF isoform from a given species, e.g. human. In preferred embodiments the VWF is a human VWF isoform (e.g. isoform 1 or 2).

[0085] Isoforms, fragments, variants or homologues may optionally be functional isoforms, fragments, variants or homologues, e.g. having a functional property/activity of the reference VWF (e.g. human VWF isoform 1), as determined by analysis by a suitable assay for the functional property/activity. For example, an isoform, fragment, variant or homologue of VWF may display association with and/or may be susceptible to cleavage by human ADAMTS13.

[0086] In some embodiments, the VWF comprises, or consists of, an amino acid sequence having at least 70%, preferably one of 80%, 85%, 90%, 91%, 92%, 93%, 94%, 95%, 96%, 97%, 98%, 99% or 100% amino acid sequence identity to SEQ ID NO:27, 28, 30 or 32.

### ADAMTS13 Variants

[0087] Aspects and embodiments of the present disclosure relate to variants of ADAMTS13.

[0088] As used herein, “an ADAMTS13 variant” refers to a polypeptide comprising, or consisting of, an amino acid sequence having at least 60%, preferably one of 65%, 70%, 75%, 80%, 85%, 90%, 91%, 92%, 93%, 94%, 95%, 96%, 97%, 98%, 99% or greater amino acid sequence identity to the amino acid sequence of wildtype human ADAMTS13, and comprising one or more amino acid substitutions relative to the amino acid sequence of wildtype human ADAMTS13.

[0089] In some embodiments, an ADAMTS13 variant according to the present disclosure is a polypeptide comprising, or consisting of, an amino acid sequence having at least 60%, preferably one of 65%, 70%, 75%, 80%, 85%, 90%, 91%, 92%, 93%, 94%, 95%, 96%, 97%, 98%, 99% or greater amino acid sequence identity to SEQ ID NO:1, 2, 3, 4, 7, 8, 9, 10, 11 or 12, and comprising one or more amino acid substitutions relative to the reference sequence.

[0090] In preferred embodiments, an ADAMTS13 variant according to the present disclosure is a polypeptide comprising, or consisting of, an amino acid sequence having at least 60%, preferably one of 65%, 70%, 75%, 80%, 85%, 90%, 91%, 92%, 93%, 94%, 95%, 96%, 97%, 98%, 99% or greater amino acid sequence identity to SEQ ID NO:1, 7 or 8, and comprising one or more amino acid substitutions relative to the reference sequence.

[0091] In some embodiments, an ADAMTS13 variant comprises, or consists of, an amino acid sequence having at least 60%, preferably one of 65%, 70%, 75%, 80%, 85%, 90%, 91%, 92%, 93%, 94%, 95%, 96%, 97%, 98%, 99% or greater amino acid sequence identity to SEQ ID NO:1, and comprising one or more amino acid substitutions relative to SEQ ID NO:1.

[0092] In some embodiments, an ADAMTS13 variant comprises, or consists of, an amino acid sequence having at least 60%, preferably one of 65%, 70%, 75%, 80%, 85%, 90%, 91%, 92%, 93%, 94%, 95%, 96%, 97%, 98%, 99% or greater amino acid sequence identity to SEQ ID NO:7, and comprising one or more amino acid substitutions relative to SEQ ID NO:7.

[0093] In some embodiments, an ADAMTS13 variant comprises, or consists of, an amino acid sequence having at least 60%, preferably one of 65%, 70%, 75%, 80%, 85%, 90%, 91%, 92%, 93%, 94%, 95%, 96%, 97%, 98%, 99% or greater amino acid sequence identity to SEQ ID NO:8, and comprising one or more amino acid substitutions relative to SEQ ID NO:8.

[0094] In some embodiments, an ADAMTS13 variant according to the present disclosure comprises more than one amino acid substitution relative to the amino acid sequence of wildtype human ADAMTS13. In some embodiments, the ADAMTS13 variant comprises 1, 2, 3, 4, 5, 6, 7, 8, 9, 10, 11, 12, 13, 14, 15, 16, 17, 18, 19 or 20 amino acid substitutions relative to the amino acid sequence of wildtype human ADAMTS13.

[0095] In some embodiments, an ADAMTS13 variant comprises, or consists of, an amino acid sequence having at least 60%, preferably one of 65%, 70%, 75%, 80%, 85%, 90%, 91%, 92%, 93%, 94%, 95%, 96%, 97%, 98%, 99% or greater amino acid sequence identity to SEQ ID NO:1, and comprising 1, 2, 3, 4, 5, 6, 7, 8, 9, 10, 11, 12, 13, 14, 15, 16, 17, 18, 19 or 20 amino acid substitutions relative to SEQ ID NO:1.

[0096] In some embodiments, an ADAMTS13 variant comprises, or consists of, an amino acid sequence having at least 60%, preferably one of 65%, 70%, 75%, 80%, 85%, 90%, 91%, 92%, 93%, 94%, 95%, 96%, 97%, 98%, 99% or greater amino acid sequence identity to SEQ ID NO:8, and comprising 1, 2, 3, 4, 5, 6, 7, 8, 9, 10, 11, 12, 13, 14, 15, 16, 17, 18, 19 or 20 amino acid substitutions relative to SEQ ID NO:7.

[0097] In some embodiments, an ADAMTS13 variant comprises, or consists of, an amino acid sequence having at least 60%, preferably one of 65%, 70%, 75%, 80%, 85%, 90%, 91%, 92%, 93%, 94%, 95%, 96%, 97%, 98%, 99% or greater amino acid sequence identity to SEQ ID NO:8, and comprising 1, 2, 3, 4, 5, 6, 7, 8, 9, 10, 11, 12, 13, 14, 15, 16, 17, 18, 19 or 20 amino acid substitutions relative to SEQ ID NO 8.

[0098] The Inventors have identified ADAMTS13 variants comprising substitutions in the linker 3 (L3) region of ADAMTS13 having proteolytic activity greater than wildtype human ADAMTS13. The L3 region of ADAMTS13 is formed of positions 1131 to 1190 of SEQ ID NO:1, and is shown in SEQ ID NO:48.

[0099] In some embodiments, an ADAMTS13 variant according to the present disclosure comprises one or more amino acid substitutions relative to the amino acid sequence of wildtype human ADAMTS13 in the region corresponding to SEQ ID NO:48. In some embodiments, an ADAMTS13 variant according to the present disclosure comprises one or more amino acid substitutions relative to the amino acid sequence of wildtype human ADAMTS13 in the region corresponding to SEQ ID NO:49.

[0100] In preferred embodiments, the one or more amino acid substitutions relative to the amino acid sequence of wildtype human ADAMTS13 are associated with greater proteolytic activity for the ADAMTS13 variant as compared to the proteolytic activity of wildtype human ADAMTS13.

[0101] In some embodiments, an ADAMTS13 variant according to the present disclosure comprises one or more (e.g. 1, 2, 3, 4, 5, 6, 7, 8, 9 or 10) substitutions relative to the amino acid sequence of wildtype human ADAMTS13 at position(s) corresponding to the following positions (numbered relative to SEQ ID NO:1): A1144, A1145, A1146, P1147, P1154, P1171, P1173, P1175, P1180, P1182. In some embodiments, an ADAMTS13 variant according to the present disclosure comprises one or more (e.g. 1, 2, 3 or 4) substitutions relative to the amino acid sequence of wildtype human ADAMTS13 at position(s) corresponding to the following positions (numbered relative to SEQ ID NO:1): A1144, A1146, P1180, P1182.

[0102] In some embodiments, an ADAMTS13 variant comprises substitution relative to the amino acid sequence of wildtype human ADAMTS13 at the position corresponding to A1144. In some embodiments, an ADAMTS13 variant comprises substitution relative to the amino acid sequence of wildtype human ADAMTS13 at the position corresponding to A1145. In some embodiments, an ADAMTS13 variant comprises substitution relative to the amino acid sequence of wildtype human ADAMTS13 at the position corresponding to A1146. In some embodiments, an ADAMTS13 variant comprises substitution relative to the amino acid sequence of wildtype human ADAMTS13 at the position corresponding to P1147. In some embodiments, an ADAMTS13 variant comprises substitution relative to the amino acid sequence of wildtype human ADAMTS13 at the position corresponding to P1154. In some embodiments, an ADAMTS13 variant comprises substitution relative to the amino acid sequence of wildtype human ADAMTS13 at the position corresponding to P1171. In some embodiments, an ADAMTS13 variant comprises substitution relative to the amino acid sequence of wildtype human ADAMTS13 at the position corresponding to P1173. In some embodiments, an ADAMTS13 variant comprises substitution relative to the amino acid sequence of wildtype human ADAMTS13 at the position corresponding to P1175. In some embodiments, an ADAMTS13 variant comprises substitution relative to the amino acid sequence of wildtype human ADAMTS13 at the position corresponding to P1180. In some embodiments, an ADAMTS13 variant comprises substitution relative to the amino acid sequence of wildtype human ADAMTS13 at the position corresponding to P1182.

[0103] In some embodiments, an ADAMTS13 variant comprises substitution of an alanine residue with another hydrophobic amino acid residue relative to the amino acid sequence of wildtype human ADAMTS13. In some embodiments, an ADAMTS13 variant comprises substitution of a proline residue with another hydrophobic amino acid residue relative to the amino acid sequence of wildtype human ADAMTS13.

[0104] In some embodiments, an ADAMTS13 variant comprises substitution of an alanine residue with a valine, isoleucine, lysine, leucine, or methionine residue relative to the amino acid sequence of wildtype human ADAMTS13. In some embodiments, an ADAMTS13 variant comprises substitution of an alanine residue with a valine, isoleucine, or lysine residue relative to the amino acid sequence of wildtype human ADAMTS13.

[0105] In some embodiments, an ADAMTS13 variant comprises substitution of a proline residue with a valine, isoleucine, lysine, leucine, or methionine residue relative to the amino acid sequence of wildtype human ADAMTS13. In some embodiments, an ADAMTS13 variant comprises substitution of a proline residue with a valine, isoleucine, or lysine residue relative to the amino acid sequence of wildtype human ADAMTS13.

[0106] In some embodiments, an ADAMTS13 variant according to the present disclosure comprises one or more (e.g. 1, 2, 3, 4, 5, 6, 7, 8, 9 or 10) of the following substitutions relative to the amino acid sequence of wildtype human ADAMTS13, at corresponding position(s) (numbered relative to SEQ ID NO:1): A1144V, A1145V, A1146V, P1147V, P1154V, P1171V, P1173V, P1175V, P1180V, P1182V. In some embodiments, an ADAMTS13 variant according to the present disclosure comprises one or more (e.g. 1, 2, 3 or 4) of the following substitutions relative to the amino acid sequence of wildtype human ADAMTS13, at corresponding position(s) (numbered relative to SEQ ID NO:1): A1144V, A1146V, P1180V, P1182V. In some embodiments, an ADAMTS13 variant comprises the substitution A1144V relative to the amino acid sequence of wildtype human ADAMTS13.

[0107] In some embodiments, an ADAMTS13 variant according to the present disclosure comprises one or more (e.g. 1, 2, 3, 4, 5, 6, 7, 8, 9 or 10) of the following substitutions relative to the amino acid sequence of wildtype human ADAMTS13, at corresponding position(s) (numbered relative to SEQ ID NO:1): A1144K, A1145K, A1146K, P1147K, P1154K, P1171K, P1173K, P1175K, P1180K, P1182K. In some embodiments, an ADAMTS13 variant according to the present disclosure comprises one or more (e.g. 1, 2, 3 or 4) of the following substitutions relative to the amino acid sequence of wildtype human ADAMTS13, at corresponding position(s) (numbered relative to SEQ ID NO:1): A1144K, A1146K, P1180K, P1182K. In some embodiments, an ADAMTS13 variant comprises the substitution A1144K relative to the amino acid sequence of wildtype human ADAMTS13.

[0108] In some embodiments, an ADAMTS13 variant according to the present disclosure comprises one or more (e.g. 1, 2, 3, 4, 5, 6, 7, 8, 9 or 10) of the following substitutions relative to the amino acid sequence of wildtype human ADAMTS13, at corresponding position(s) (numbered relative to SEQ ID NO:1): A1144I, A1145I, A1146I, P1147I, P1154I, P1171I, P1173I, P1175I, P1180I, P1182I. In some embodiments, an ADAMTS13 variant according to the present disclosure comprises one or more (e.g. 1, 2, 3 or 4) of the following substitutions relative to the amino acid sequence of wildtype human ADAMTS13, at corresponding position(s) (numbered relative to SEQ ID NO:1): A1144I, A1146I, P1180I, P1182I. In some embodiments, an ADAMTS13 variant comprises the substitution A1144I relative to the amino acid sequence of wildtype human ADAMTS13.

[0109] In some embodiments, an ADAMTS13 variant comprises the substitution A1144V relative to the amino acid sequence of wildtype human ADAMTS13, at the corresponding position. In some embodiments, an ADAMTS13 variant comprises the substitution A1146V relative to the amino acid sequence of wildtype human ADAMTS13, at the corresponding position. In some embodiments, an ADAMTS13 variant comprises the substitution P1147V relative to the amino acid sequence of wildtype human ADAMTS13, at the corresponding position. In some embodiments, an ADAMTS13 variant comprises the substitution P1154V relative to the amino acid sequence of wildtype human ADAMTS13, at the corresponding position. In some embodiments, an ADAMTS13 variant comprises the substitution P1171V relative to the amino acid sequence of wildtype human ADAMTS13, at the corresponding position. In some embodiments, an ADAMTS13 variant comprises the substitution P1173V relative to the amino acid sequence of wildtype human ADAMTS13, at the corresponding position. In some embodiments, an ADAMTS13 variant comprises the substitution P1175V relative to the amino acid sequence of wildtype human ADAMTS13, at the corresponding position. In some embodiments, an ADAMTS13 variant comprises the substitution P1180V relative to the amino acid sequence of wildtype human ADAMTS13, at the corresponding position. In some embodiments, an ADAMTS13 variant comprises the substitution P1182V relative to the amino acid sequence of wildtype human ADAMTS13, at the corresponding position.

[0110] In some embodiments, an ADAMTS13 variant comprises the substitution A1144K relative to the amino acid sequence of wildtype human ADAMTS13, at the corresponding position. In some embodiments, an ADAMTS13 variant comprises the substitution A1146K relative to the amino acid sequence of wildtype human ADAMTS13, at the corresponding position. In some embodiments, an ADAMTS13 variant comprises the substitution P1147K relative to the amino acid sequence of wildtype human ADAMTS13, at the corresponding position. In some embodiments, an ADAMTS13 variant comprises the substitution P1154K relative to the amino acid sequence of wildtype human ADAMTS13, at the corresponding position. In some embodiments, an ADAMTS13 variant comprises the substitution P1171K relative to the amino acid sequence of wildtype human ADAMTS13, at the corresponding position. In some embodiments, an ADAMTS13 variant comprises the substitution P1173K relative to the amino acid sequence of wildtype human ADAMTS13, at the corresponding position. In some embodiments, an ADAMTS13 variant comprises the substitution P1175K relative to the amino acid sequence of wildtype human ADAMTS13, at the corresponding position. In some embodiments, an ADAMTS13 variant comprises the substitution P1180K relative to the amino acid sequence of wildtype human ADAMTS13, at the corresponding position. In some embodiments, an ADAMTS13 variant comprises the substitution P1182K relative to the amino acid sequence of wildtype human ADAMTS13, at the corresponding position.

[0111] In some embodiments, an ADAMTS13 variant comprises the substitution A1144I relative to the amino acid sequence of wildtype human ADAMTS13, at the corresponding position. In some embodiments, an ADAMTS13 variant comprises the substitution A1146I relative to the amino acid sequence of wildtype human ADAMTS13, at the corresponding position. In some embodiments, an ADAMTS13 variant comprises the substitution P1147I relative to the amino acid sequence of wildtype human ADAMTS13, at the corresponding position. In some embodiments, an ADAMTS13 variant comprises the substitution P1154I relative to the amino acid sequence of wildtype human ADAMTS13, at the corresponding position. In some embodiments, an ADAMTS13 variant comprises the substitution P1171I relative to the amino acid sequence of wildtype human ADAMTS13, at the corresponding position. In some embodiments, an ADAMTS13 variant comprises the substitution P1173I relative to the amino acid sequence of wildtype human ADAMTS13, at the corresponding position. In some embodiments, an ADAMTS13 variant comprises the substitution P1175I relative to the amino acid sequence of wildtype human ADAMTS13, at the corresponding position. In some embodiments, an ADAMTS13 variant comprises the substitution P1180I relative to the amino acid sequence of wildtype human ADAMTS13, at the corresponding position. In some embodiments, an ADAMTS13 variant comprises the substitution P1182I relative to the amino acid sequence of wildtype human ADAMTS13, at the corresponding position.

[0112] In some embodiments, an ADAMTS13 variant comprises an amino acid sequence according to SEQ ID NO:50, wherein the amino acid sequence is non-identical to SEQ ID NO:49.

[0113] In some embodiments, an ADAMTS13 variant comprises the amino acid sequence of SEQ ID NO:51, 136, or 146, or an amino acid sequence having at least 60%, preferably one of 65%, 70%, 75%, 80%, 85%, 90%, 91%, 92%, 93%, 94%, 95%, 96%, 97%, 98%, 99% or greater amino acid sequence identity to SEQ ID NO:51, 136, or 146, comprising V, K, or I, respectively, at the position corresponding to position 1144.

[0114] In some embodiments, an ADAMTS13 variant comprises the amino acid sequence of SEQ ID NO:52, 137, or 147, or an amino acid sequence having at least 60%, preferably one of 65%, 70%, 75%, 80%, 85%, 90%, 91%, 92%, 93%, 94%, 95%, 96%, 97%, 98%, 99% or greater amino acid sequence identity to SEQ ID NO:52, 137, or 147, comprising V, K, or I, respectively, at the position corresponding to position 1145.

[0115] In some embodiments, an ADAMTS13 variant comprises the amino acid sequence of SEQ ID NO:53, 138, or 148, or an amino acid sequence having at least 60%, preferably one of 65%, 70%, 75%, 80%, 85%, 90%, 91%, 92%, 93%, 94%, 95%, 96%, 97%, 98%, 99% or greater amino acid sequence identity to SEQ ID NO:53, 138, or 148, comprising V, K, or I, respectively, at the position corresponding to position 1146.

[0116] In some embodiments, an ADAMTS13 variant comprises the amino acid sequence of SEQ ID NO:54, 139, or 149, or an amino acid sequence having at least 60%, preferably one of 65%, 70%, 75%, 80%, 85%, 90%, 91%, 92%, 93%, 94%, 95%, 96%, 97%, 98%, 99% or greater amino acid sequence identity to SEQ ID NO:54, 139, or 149, comprising V, K, or I, respectively, at the position corresponding to position 1147.

[0117] In some embodiments, an ADAMTS13 variant comprises the amino acid sequence of SEQ ID NO:55, 140, or 150, or an amino acid sequence having at least 60%, preferably one of 65%, 70%, 75%, 80%, 85%, 90%, 91%, 92%, 93%, 94%, 95%, 96%, 97%, 98%, 99% or greater amino acid sequence identity to SEQ ID NO:55, 140, or 150, comprising V, K, or I, respectively, at the position corresponding to position 1154.

[0118] In some embodiments, an ADAMTS13 variant comprises the amino acid sequence of SEQ ID NO:56, 141, or 151, or an amino acid sequence having at least 60%, preferably one of 65%, 70%, 75%, 80%, 85%, 90%, 91%, 92%, 93%, 94%, 95%, 96%, 97%, 98%, 99% or greater amino acid sequence identity to SEQ ID NO:56, 141, or 151, comprising V, K, or I, respectively, at the position corresponding to position 1171.

[0119] In some embodiments, an ADAMTS13 variant comprises the amino acid sequence of SEQ ID NO:57, 142, or 152, or an amino acid sequence having at least 60%, preferably one of 65%, 70%, 75%, 80%, 85%, 90%, 91%, 92%, 93%, 94%, 95%, 96%, 97%, 98%, 99% or greater amino acid sequence identity to SEQ ID NO:57, 142, or 152, comprising V, K, or I, respectively, at the position corresponding to position 1173.

[0120] In some embodiments, an ADAMTS13 variant comprises the amino acid sequence of SEQ ID NO:58, 143, or 153, or an amino acid sequence having at least 60%, preferably one of 65%, 70%, 75%, 80%, 85%, 90%, 91%, 92%, 93%, 94%, 95%, 96%, 97%, 98%, 99% or greater amino acid sequence identity to SEQ ID NO:58, 143, or 153, comprising V, K, or I, respectively, at the position corresponding to position 1175.

[0121] In some embodiments, an ADAMTS13 variant comprises the amino acid sequence of SEQ ID NO:59, 144, or 154, or an amino acid sequence having at least 60%, preferably one of 65%, 70%, 75%, 80%, 85%, 90%, 91%, 92%, 93%, 94%, 95%, 96%, 97%, 98%, 99% or greater amino acid sequence identity to SEQ ID NO:59, 144, or 154, comprising V, K, or I, respectively, at the position corresponding to position 1180.

[0122] In some embodiments, an ADAMTS13 variant comprises the amino acid sequence of SEQ ID NO:60, 145, or 155, or an amino acid sequence having at least 60%, preferably one of 65%, 70%, 75%, 80%, 85%, 90%, 91%, 92%, 93%, 94%, 95%, 96%, 97%, 98%, 99% or greater amino acid sequence identity to SEQ ID NO:60, 145, or 155, comprising V, K, or I, respectively, at the position corresponding to position 1182.

[0123] One known ADAMTS13 variant, known as a gain of function (GoF) ADAMTS13 variant (R568K/F592Y/R660K/Y661F/Y665F), has previously been shown to have disrupt autoinhibition and enhance proteolytic activity as compared to wild-type human ADAMTS13, and is described in Jian et al., Blood (2012) 119: 3836-3843 (hereby incorporated by reference in its entirety). The R568K/F592Y/R660K/Y661F/Y665F variant amino acid substitutions are provided in the spacer region of ADAMTS13. Whilst this known GoF variant has higher activity than wild type ADAMTS13, it has lower proteolytic activity than variants of the present disclosure.

[0124] In some embodiments, an ADAMTS13 variant of the present disclosure is non-identical to an ADAMTS13 variant disclosed in Jian et al., Blood (2012) 119: 3836-3843. In some embodiments, an ADAMTS13 variant of the present disclosure does not comprise, or consist of, the amino acid sequence of SEQ ID NO:71.

[0125] In some embodiments, an ADAMTS13 variant comprises one or more (e.g. 1, 2, 3, 4 or 5) substitutions relative to the amino acid sequence of wildtype human ADAMTS13 at position(s) corresponding to the following positions (numbered relative to SEQ ID NO:1): R568, F592, R660, Y661, Y665.

[0126] In some embodiments, an ADAMTS13 variant comprises one or more (e.g. 1, 2, 3, 4 or 5) of the following substitutions relative to the amino acid sequence of wildtype human ADAMTS13, at corresponding position(s) (numbered relative to SEQ ID NO:1): R568K, F592Y, R660K, Y661F, Y665F.

[0127] In some embodiments, an ADAMTS13 variant comprises the amino acid sequence of SEQ ID NO:13, or an amino acid sequence having at least 60%, preferably one of 65%, 70%, 75%, 80%, 85%, 90%, 91%, 92%, 93%, 94%, 95%, 96%, 97%, 98%, 99% or 100% amino acid sequence identity to SEQ ID NO:13.

[0128] In some embodiments, an ADAMTS13 variant comprises the amino acid sequence of SEQ ID NO:14, or an amino acid sequence having at least 60%, preferably one of 65%, 70%, 75%, 80%, 85%, 90%, 91%, 92%, 93%, 94%, 95%, 96%, 97%, 98%, 99% or 100% amino acid sequence identity to SEQ ID NO:14.

[0129] In some embodiments, an ADAMTS13 variant comprises the amino acid sequence of SEQ ID NO:15, or an amino acid sequence having at least 60%, preferably one of 65%, 70%, 75%, 80%, 85%, 90%, 91%, 92%, 93%, 94%, 95%, 96%, 97%, 98%, 99% or 100% amino acid sequence identity to SEQ ID NO:15.

[0130] In some embodiments, an ADAMTS13 variant comprises the amino acid sequence of SEQ ID NO:16, or an amino acid sequence having at least 60%, preferably one of 65%, 70%, 75%, 80%, 85%, 90%, 91%, 92%, 93%, 94%, 95%, 96%, 97%, 98%, 99% or 100% amino acid sequence identity to SEQ ID NO:16.

[0131] In some embodiments, an ADAMTS13 variant comprises the amino acid sequence of SEQ ID NO:17, or an amino acid sequence having at least 60%, preferably one of 65%, 70%, 75%, 80%, 85%, 90%, 91%, 92%, 93%, 94%, 95%, 96%, 97%, 98%, 99% or 100% amino acid sequence identity to SEQ ID NO:17.

[0132] In some embodiments, an ADAMTS13 variant comprises the amino acid sequence of SEQ ID NO:18, or an amino acid sequence having at least 60%, preferably one of 65%, 70%, 75%, 80%, 85%, 90%, 91%, 92%, 93%, 94%, 95%, 96%, 97%, 98%, 99% or 100% amino acid sequence identity to SEQ ID NO:18.

[0133] In some embodiments, an ADAMTS13 variant comprises the amino acid sequence of SEQ ID NO:19, or an amino acid sequence having at least 60%, preferably one of 65%, 70%, 75%, 80%, 85%, 90%, 91%, 92%, 93%, 94%, 95%, 96%, 97%, 98%, 99% or 100% amino acid sequence identity to SEQ ID NO:19.

[0134] In some embodiments, an ADAMTS13 variant comprises the amino acid sequence of SEQ ID NO 20, or an amino acid sequence having at least 60%, preferably one of 65%, 70%, 75%, 80%, 85%, 90%, 91%, 92%, 93%, 94%, 95%, 96%, 97%, 98%, 99% or 100% amino acid sequence identity to SEQ ID NO:20.

[0135] In some embodiments, an ADAMTS13 variant comprises the amino acid sequence of SEQ ID N021, or an amino acid sequence having at least 60%, preferably one of 65%, 70%, 75%, 80%, 85%, 90%, 91%, 92%, 93%, 94%, 95%, 96%, 97%, 98%, 99% or 100% amino acid sequence identity to SEQ ID NO:21.

[0136] In some embodiments, an ADAMTS13 variant comprises the amino acid sequence of SEQ ID NO:22, or an amino acid sequence having at least 60%, preferably one of 65%, 70%, 75%, 80%, 85%, 90%, 91%, 92%, 93%, 94%, 95%, 96%, 97%, 98%, 99% or 100% amino acid sequence identity to SEQ ID NO:22.

[0137] In some embodiments, an ADAMTS13 variant comprises the amino acid sequence of SEQ ID NO:23, or an amino acid sequence having at least 60%, preferably one of 65%, 70%, 75%, 80%, 85%, 90%, 91%, 92%, 93%, 94%, 95%, 96%, 97%, 98%, 99% or 100% amino acid sequence identity to SEQ ID NO:23.

[0138] In some embodiments, an ADAMTS13 variant comprises the amino acid sequence of SEQ ID NO:24, or an amino acid sequence having at least 60%, preferably one of 65%, 70%, 75%, 80%, 85%, 90%, 91%, 92%, 93%, 94%, 95%, 96%, 97%, 98%, 99% or 100% amino acid sequence identity to SEQ ID NO:24.

[0139] In some embodiments, an ADAMTS13 variant comprises the amino acid sequence of SEQ ID NO:25, or an amino acid sequence having at least 60%, preferably one of 65%, 70%, 75%, 80%, 85%, 90%, 91%, 92%, 93%, 94%, 95%, 96%, 97%, 98%, 99% or 100% amino acid sequence identity to SEQ ID NO:25.

[0140] In some embodiments, an ADAMTS13 variant comprises the amino acid sequence of SEQ ID N026, or an amino acid sequence having at least 60%, preferably one of 65%, 70%, 75%, 80%, 85%, 90%, 91%, 92%, 93%, 94%, 95%, 96%, 97%, 98%, 99% or 100% amino acid sequence identity to SEQ ID NO:26.

[0141] In some embodiments, an ADAMTS13 variant comprises, or consists of, the amino acid sequence of SEQ ID NO:61, or an amino acid sequence having at least 60%, preferably one of 65%, 70%, 75%, 80%, 85%, 90%, 91%, 92%, 93%, 94%, 95%, 96%, 97%, 98%, 99% or 100% amino acid sequence identity to SEQ ID NO:61.

[0142] In some embodiments, an ADAMTS13 variant comprises, or consists of, the amino acid sequence of SEQ ID NO:62, or an amino acid sequence having at least 60%, preferably one of 65%, 70%, 75%, 80%, 85%, 90%, 91%, 92%, 93%, 94%, 95%, 96%, 97%, 98%, 99% or 100% amino acid sequence identity to SEQ ID NO:62.

[0143] In some embodiments, an ADAMTS13 variant comprises, or consists of, the amino acid sequence of SEQ ID NO:63, or an amino acid sequence having at least 60%, preferably one of 65%, 70%, 75%, 80%, 85%, 90%, 91%, 92%, 93%, 94%, 95%, 96%, 97%, 98%, 99% or 100% amino acid sequence identity to SEQ ID NO:63.

[0144] In some embodiments, an ADAMTS13 variant comprises, or consists of, the amino acid sequence of SEQ ID NO:64, or an amino acid sequence having at least 60%, preferably one of 65%, 70%, 75%, 80%, 85%, 90%, 91%, 92%, 93%, 94%, 95%, 96%, 97%, 98%, 99% or 100% amino acid sequence identity to SEQ ID NO:64.

[0145] In some embodiments, an ADAMTS13 variant comprises, or consists of, the amino acid sequence of SEQ ID NO:65, or an amino acid sequence having at least 60%, preferably one of 65%, 70%, 75%, 80%, 85%, 90%, 91%, 92%, 93%, 94%, 95%, 96%, 97%, 98%, 99% or 100% amino acid sequence identity to SEQ ID NO:65.

[0146] In some embodiments, an ADAMTS13 variant comprises, or consists of, the amino acid sequence of SEQ ID NO:66, or an amino acid sequence having at least 60%, preferably one of 65%, 70%, 75%, 80%, 85%, 90%, 91%, 92%, 93%, 94%, 95%, 96%, 97%, 98%, 99% or 100% amino acid sequence identity to SEQ ID NO:66.

[0147] In some embodiments, an ADAMTS13 variant comprises, or consists of, the amino acid sequence of SEQ ID NO:67, or an amino acid sequence having at least 60%, preferably one of 65%, 70%, 75%, 80%, 85%, 90%, 91%, 92%, 93%, 94%, 95%, 96%, 97%, 98%, 99% or 100% amino acid sequence identity to SEQ ID NO:67.

[0148] In some embodiments, an ADAMTS13 variant comprises, or consists of, the amino acid sequence of SEQ ID NO:68, or an amino acid sequence having at least 60%, preferably one of 65%, 70%, 75%, 80%, 85%, 90%, 91%, 92%, 93%, 94%, 95%, 96%, 97%, 98%, 99% or 100% amino acid sequence identity to SEQ ID NO:68.

[0149] In some embodiments, an ADAMTS13 variant comprises, or consists of, the amino acid sequence of SEQ ID NO:69, or an amino acid sequence having at least 60%, preferably one of 65%, 70%, 75%, 80%, 85%, 90%, 91%, 92%, 93%, 94%, 95%, 96%, 97%, 98%, 99% or 100% amino acid sequence identity to SEQ ID NO:69.

[0150] In some embodiments, an ADAMTS13 variant comprises, or consists of, the amino acid sequence of SEQ ID NO:70, or an amino acid sequence having at least 60%, preferably one of 65%, 70%, 75%, 80%, 85%, 90%, 91%, 92%, 93%, 94%, 95%, 96%, 97%, 98%, 99% or 100% amino acid sequence identity to SEQ ID NO:70.

### Functional Properties of the ADAMTS13 Variants

[0151] The ADAMTS13 variants of the present disclosure may be characterised by reference to certain functional properties.

[0152] In some embodiments, an ADAMTS13 variant described herein may display one or more of the following properties:
[0153] proteolytic activity, e.g. VWF-cleaving activity;
[0154] increased proteolytic activity as compared to wildtype human ADAMTS13; increased proteolytic activity as compared to the R568K/F592Y/R660K/Y661F/Y665F ADAMTS13 variant;
[0155] inhibition of VWF-mediated platelet capture, e.g. under arterial shear stress;
[0156] increased inhibition of VWF-mediated platelet capture as compared to wildtype human ADAMTS13;
[0157] increased inhibition of VWF-mediated platelet capture as compared to the R568K/F592Y/R660K/Y661F/Y665F ADAMTS13 variant;
[0158] inhibition of thrombosis;
[0159] increased inhibition of thrombosis as compared to wildtype human ADAMTS13;
[0160] increased inhibition of thrombosis as compared to the R568K/F592Y/R660K/Y661F/Y665F ADAMTS13 variant;
[0161] inhibition of blood clotting/coagulation;
[0162] increased inhibition of blood clotting/coagulation as compared to wildtype human ADAMTS13;
[0163] increased inhibition of blood clotting/coagulation as compared to the R568K/F592Y/R660K/Y661F/Y665F ADAMTS13 variant;
[0164] inhibition of inflammation, e.g. in an in vivo model of inflammation;
[0165] increased inhibition of inflammation as compared to wildtype human ADAMTS13;
[0166] increased inhibition of inflammation as compared to the R568K/F592Y/R660K/Y661F/Y665F ADAMTS13 variant.

[0167] As explained hereinabove, ADAMTS13 cleaves VWF, at the peptide bond formed between positions Y1605 and M1606 (numbering relative to SEQ ID NO:27), within the VWFA2 domain of VWF. The present disclosure is particularly concerned with variants of ADAMTS13 having improved/increased proteolytic activity as compared to wildtype human ADAMTS13 (e.g. a polypeptide comprising, or consisting of, the amino acid sequence of SEQ ID NO:1, 7 or 8).

[0168] Proteolytic activity refers to the lysis of peptides/polypeptides, producing smaller peptides/polypeptides and/or the constituent amino acids thereof. Proteolysis may involve hydrolysis of peptide bonds between amino acids of a peptide/polypeptide. Proteolytic activity is the enzymatic activity of an enzyme performing proteolysis. Proteolytic activity is determined by the amount of substrate broken down (or amount of substrate hydrolysis) by a pre-determined amount of protease over a pre-determined time period. Proteolytic activity can be measured using any method known in the art.

[0169] ADAMTS13 variants having improved proteolytic activity relative to wildtype human ADAMTS13 may be described as having greater/higher/Improved/Increased metalloprotease activity, or may be described as having greater/higher/improved/increased VWF-cleaving activity relative to wildtype human ADAMTS13.

[0170] A given variant of ADAMTS13 may be evaluated for proteolytic activity in a suitable in vitro assay. Such an assay may comprise contacting a substrate for cleavage by ADAMTS13 with the ADAMTS13 variant under conditions suitable for cleavage of the substrate by ADAMTS13, and analysing the sample for products of cleavage and/or for uncleaved substrate after a sufficient period of time for cleavage of the substrate to have occurred.

[0171] An example of a suitable assay of such activity is the assay evaluating cleavage of the FRETS-VWF73 molecule, as described in South et al. Proc Natl Acad Sci USA. (2014) 111(52): 18578-18583, which is hereby incorporated by reference In Its entirety. FRETS-VWF73 Is a VWF fragment comprising VWFA2 domain residues 1596 to 1668 encompassing the ADAMTS13 cleavage site.

[0172] Briefly, ADAMTS13 variants may be diluted to a concentration of 0.3 nM in 5 mM Bis-Tris pH 6.0, 25 mM CaCl₂, and 0.005% Tween-20, in white 96-well plates (Nunc). Purified VWF D4-CK fragment may be added to a final concentration of 20-60 nM prior to a 45 min preincubation at 37° C., or the assay may performed in the absence of added purified VWF D4-CK fragment. The reaction may be initiated by the addition of an equal volume of 4 μM FRETS-VWF73 substrate (Peptanova). Fluorescence (excitation, 340 nm; emission, 460 nm) may be measured at 30° C. at 1 min intervals for 1 h using an appropriate plate reader (e.g. Fluostar Omega plate reader (BMG Labtech)). Fluorescence measurements may be compared to values obtained for wildtype human ADAMTS13.

[0173] In some embodiments, an ADAMTS13 variant according to the present disclosure displays a level of proteolytic activity which is greater than 1 times, e.g. one of ≥1.01 times, ≥1.02 times, ≥1.03 times, ≥1.04 times, ≥1.05 times, ≥1.1 times, ≥1.2 times, ≥1.3 times, ≥1.4 times, ≥1.5 times, ≥1.6 times, ≥1.7 times, ≥1.8 times, ≥1.9 times, ≥2 times, ≥2.1 times, ≥2.2 times, ≥2.3 times, ≥2.4 times, ≥2.5 times, ≥2.6 times, ≥2.7 times, ≥2.8 times, ≥2.9 times, ≥3 times, ≥3.1 times, ≥3.2 times, ≥3.3 times, ≥3.4 times, ≥3.5 times, ≥3.6 times, ≥3.7 times, ≥3.8 times, ≥3.9 times, ≥4 times, ≥4.1 times, ≥4.2 times, ≥4.3 times, ≥4.4 times, ≥4.5 times, ≥4.6 times, ≥4.7 times, ≥4.8 times, ≥4.9 times or ≥5 times the level proteolytic activity determined for wildtype human ADAMTS13 (e.g. a polypeptide comprising, or consisting of, the amino acid sequence of SEQ ID NO:1, 7 or 8) in the same assay.

[0174] In preferred embodiments, an ADAMTS13 variant according to the present disclosure may display a level of proteolytic activity which is greater than 2.5 times, e.g. one of ≥2.6 times, ≥2.7 times, ≥2.8 times, ≥2.9 times, ≥3 times, ≥3.1 times, ≥3.2 times, ≥3.3 times, ≥3.4 times, ≥3.5 times, ≥3.6 times, ≥3.7 times, ≥3.8 times, ≥3.9 times, ≥4 times, ≥4.1 times, ≥4.2 times, ≥4.3 times, ≥4.4 times, ≥4.5 times, ≥4.6 times, ≥4.7 times, ≥4.8 times, ≥4.9 times or ≥5 times the level proteolytic activity determined for wildtype human ADAMTS13 (e.g. a polypeptide comprising, or consisting of, the amino acid sequence of SEQ ID NO:1, 7 or 8) in the same assay.

[0175] In some embodiments, an ADAMTS13 variant according to the present disclosure has improved/increased proteolytic activity as compared to the ADAMTS13 R568K/F592Y/R660K/Y661F/Y665F variant described in Jian et al., Blood (2012) 119: 3836-3843. In some embodiments, an ADAMTS13 variant has improved proteolytic activity as compared to a polypeptide, comprising or consisting of, the amino acid sequence of SEQ ID NO:71.

[0176] In some embodiments, an ADAMTS13 variant according to the present disclosure may display a level of proteolytic activity which is greater than 1 times, e.g. one of ≥1.01 times, ≥1.02 times, ≥1.03 times, ≥1.04 times, ≥1.05 times, ≥1.1 times, ≥1.2 times, ≥1.3 times, ≥1.4 times, ≥1.5 times, ≥1.6 times, ≥1.7 times, ≥1.8 times, ≥1.9 times, ≥2 times, ≥2.1 times, ≥2.2 times, ≥2.3 times, ≥2.4 times, ≥2.5 times, ≥2.6 times, ≥2.7 times, ≥2.8 times, ≥2.9 times, ≥3 times, ≥3.1 times, ≥3.2 times, ≥3.3 times, ≥3.4 times, ≥3.5 times, ≥3.6 times, ≥3.7 times, ≥3.8 times, ≥3.9 times, ≥4 times, ≥4.1 times, ≥4.2 times, ≥4.3 times, ≥4.4 times, ≥4.5 times, ≥4.6 times, ≥4.7 times, ≥4.8 times, ≥4.9 times or ≥5 times the level proteolytic activity determined for the ADAMTS13 R568K/F592Y/R660K/Y661F/Y665F variant (e.g. a polypeptide comprising, or consisting of, the amino acid sequence of SEQ ID NO:71) in the same assay.

[0177] In preferred embodiments, an ADAMTS13 variant according to the present disclosure may display a level of proteolytic activity which is greater than 2 times, e.g. one of ≥2.1 times, ≥2.2 times, ≥2.3 times, ≥2.4 times, ≥2.5 times, ≥2.6 times, ≥2.7 times, ≥2.8 times, ≥2.9 times, ≥3 times, ≥3.1 times, ≥3.2 times, ≥3.3 times, ≥3.4 times, ≥3.5 times, ≥3.6 times, ≥3.7 times, ≥3.8 times, ≥3.9 times, ≥4 times, ≥4.1 times, ≥4.2 times, ≥4.3 times, ≥4.4 times, ≥4.5 times, ≥4.6 times, ≥4.7 times, ≥4.8 times, ≥4.9 times or ≥5 times the level proteolytic activity determined for the ADAMTS13 R568K/F592Y/R660K/Y661F/Y665F variant (e.g. a polypeptide comprising, or consisting of, the amino acid sequence of SEQ ID NO:71) in the same assay.

[0178] In some embodiments, an ADAMTS13 variant according to the present disclosure displays improved/increased inhibition of VWF-mediated platelet capture as compared to wildtype human ADAMTS13, and/or the ADAMTS13 R568K/F592Y/R660K/Y661F/Y665F variant described in Jian et al., Blood (2012) 119: 3836-3843.

[0179] A given variant of ADAMTS13 may be evaluated for its ability to inhibit VWF-mediated platelet capture under arterial shear stress, and/or for the extent to which it inhibits VWF-mediated platelet capture under arterial shear stress, in a suitable in vitro assay. An example of such an assay is described in Example 1 herein.

[0180] The ability of ADAMTS13 variants to inhibit VWF-mediated platelet capture under arterial shear stress can be assessed through a FRETS-VWF73 assay. FRETS-VWF73 assays of ADAMTS13-mediated proteolysis of VWF are described in South et al., 2018.

[0181] One way of performing the assay is as follows: Coat Vena8 Fluoro+ biochips (Cellix) with 200 μg/ml collagen type III (Southern Biotech) and block with 1% BSA, 1 mg/ml glucose in HEPES buffer. Combine washed platelets with red blood cells, and treat with 100 nM PGE1 and 75 mU/ml Apyrase, to prevent platelet activation, before labelling platelets 10 μM DiOC6. Supplement platelets with 10 μg/ml multimeric plasma VWF and perfuse over the collagen surface at a constant shear rate of 1500 s-1 (at which platelet capture is VWF dependent) for 5 minutes. Adhesion of labelled platelets can be visualised by fluorescence imaging at 250 ms intervals using a 20× objective and analysed using Slidebook software to determine platelet coverage (%) at 270 seconds. To determine the effect of ADAMTS13 on platelet capture the assay can be performed in the presence of WT or variant ADAMTS13 at a range of concentrations. EC50 values can be determined by dose-response curves.

[0182] In some embodiments, an ADAMTS13 variant according to the present disclosure inhibits VWF-mediated platelet capture to a level which is less than 1 times, e.g. one of ≤0.99 times, ≤0.95 times, ≤0.9 times, ≤0.85 times, ≤0.8 times, ≤0.75 times, ≤0.7 times, ≤0.65 times, ≤0.6 times, ≤0.55 times, ≤0.5 times, ≤0.45 times, ≤0.4 times, ≤0.35 times, ≤0.3 times, ≤0.25 times, ≤0.2 times, ≤0.15 times or ≤0.1 times the level to which VWF-mediated platelet capture is inhibited by wildtype human ADAMTS13 (e.g. a polypeptide comprising, or consisting of, the amino acid sequence of SEQ ID NO:1, 7 or 8) In the same assay.

[0183] In some embodiments, an ADAMTS13 variant according to the present disclosure inhibits VWF-mediated platelet capture to a level which is less than 1 times, e.g. one of ≤0.99 times, ≤0.95 times, ≤0.9 times, ≤0.85 times, ≤0.8 times, ≤0.75 times, ≤0.7 times, ≤0.65 times, ≤0.6 times, ≤0.55 times, ≤0.5 times, ≤0.45 times, ≤0.4 times, ≤0.35 times, ≤0.3 times, ≤0.25 times, ≤0.2 times, ≤0.15 times or ≤0.1 times the level to which VWF-mediated platelet capture is inhibited by the ADAMTS13 R568K/F592Y/R660K/Y661F/665F variant (e.g. a polypeptide comprising, or consisting of, the amino acid sequence of SEQ ID NO:71) in the same assay.

[0184] In some embodiments, an ADAMTS13 variant according to the present disclosure displays improved/increased inhibition of thrombosis as compared to wildtype human ADAMTS13, and/or the ADAMTS13 R568K/F592Y/R660K/Y661F/Y665F variant described in Jian et al., Blood (2012) 119: 3836-3843.

[0185] A given variant of ADAMTS13 may be evaluated for its ability to inhibit thrombosis, and/or for the extent to which it inhibits thrombosis, in a suitable in vitro or in vivo assay.

[0186] One such appropriate in vitro assay is performed as follows: platelet-rich plasma or whole blood can be perfused over a pro-thrombotic surface (collagen and/or tissue factor coated) in a microfluidic perfusion chamber. Using fluorescently labelled donor platelets and/or fluorescently labelled fibrinogen allows thrombus formation to be monitored microscopically in real time. Other methods are known in the art.

[0187] One such appropriate in vivo assay is performed as follows: application of FeCl₃ to the exposed middle cerebral artery or the mesenteric arteries of the cremaster muscle in mice or rats. Can be performed in the presence of fluorescently labelled donor platelets and leukocytes and/or labelled fibrinogen. Thrombus formation can be visualised in situ using 2-photon microscopy. Other methods are known in the art.

[0188] In some embodiments, an ADAMTS13 variant according to the present disclosure inhibits thrombosis to a level which is less than 1 times, e.g. one of ≤0.99 times, ≤0.95 times, ≤0.9 times, ≤0.85 times, ≤0.8 times, ≤0.75 times, ≤0.7 times, ≤0.65 times, ≤0.6 times, ≤0.55 times, ≤0.5 times, ≤0.45 times, ≤0.4 times, ≤0.35 times, ≤0.3 times, ≤0.25 times, ≤0.2 times, ≤0.15 times or ≤0.1 times the level to which thrombosis is inhibited by wildtype human ADAMTS13 (e.g. a polypeptide comprising, or consisting of, the amino acid sequence of SEQ ID NO:1, 7 or 8) in the same assay.

[0189] In some embodiments, an ADAMTS13 variant according to the present disclosure inhibits thrombosis to a level which is less than 1 times, e.g. one of ≤0.99 times, ≤0.95 times, ≤0.9 times, ≤0.85 times, ≤0.8 times, ≤0.75 times, ≤0.7 times, ≤0.65 times, ≤0.6 times, ≤0.55 times, ≤0.5 times, ≤0.45 times, ≤0.4 times, ≤0.35 times, ≤0.3 times, ≤0.25 times, ≤0.2 times, ≤0.15 times or ≤0.1 times the level to which thrombosis is inhibited by the ADAMTS13 R568K/F592Y/R660K/Y661F/Y685F variant (e.g. a polypeptide comprising, or consisting of, the amino acid sequence of SEQ ID NO:71) in the same assay.

[0190] In some embodiments, an ADAMTS13 variant according to the present disclosure displays improved/increased inhibition of blood clotting/coagulation as compared to wildtype human ADAMTS13, and/or the ADAMTS13 R568K/F592Y/R660K/Y661F/Y665F variant described in Jian et al., Blood (2012) 119: 3836-3843.

[0191] A given variant of ADAMTS13 may be evaluated for its ability to inhibit blood clotting/coagulation, and/or for the extent to which it inhibits blood clotting/coagulation, in a suitable in vitro or in vivo assay.

[0192] One such appropriate in vitro assay is performed as follows: blood clotting can be measured simply using a turbidity assay. The absorbance of blood (or more often platelet rich or platelet poor plasma) is measured at 405 nm and increases upon addition of thrombin or tissue factor, as fibrinogen is converted to fibrin forming a clot. Other methods are known in the art.

[0193] The time taken for cessation of bleeding, following transverse amputation of the tall of a rodent, can be used as an in vivo assay. Other methods are known in the art.

[0194] In some embodiments, an ADAMTS13 variant according to the present disclosure inhibits blood clotting/coagulation to a level which is less than 1 times, e.g. one of ≤0.99 times, ≤0.95 times, ≤0.9 times, ≤0.85 times, ≤0.8 times, ≤0.75 times, ≤0.7 times, ≤0.65 times, ≤0.6 times, ≤0.55 times, ≤0.5 times, ≤0.45 times, ≤0.4 times, ≤0.35 times, ≤0.3 times, ≤0.25 times, ≤0.2 times, ≤0.15 times or ≤0.1 times the level to which blood clotting/coagulation is inhibited by wildtype human ADAMTS13 (e.g. a polypeptide comprising, or consisting of, the amino acid sequence of SEQ ID NO:1, 7 or 8) in the same assay.

[0195] In some embodiments, an ADAMTS13 variant according to the present disclosure inhibits blood clotting/coagulation to a level which is less than 1 times, e.g. one of ≤0.99 times, ≤0.95 times, ≤0.9 times, ≤0.85 times, ≤0.8 times, ≤0.75 times, ≤0.7 times, ≤0.65 times, ≤0.6 times, ≤0.55 times, ≤0.5 times, ≤0.45 times, ≤0.4 times, ≤0.35 times, ≤0.3 times, ≤0.25 times, ≤0.2 times, ≤0.15 times or ≤0.1 times the level to which blood clotting/coagulation is inhibited by the ADAMTS13 R568K/F592Y/R660K/Y661F/Y665F variant (e.g. a polypeptide comprising, or consisting of, the amino acid sequence of SEQ ID NO:71) in the same assay.

[0196] In some embodiments, an ADAMTS13 variant according to the present disclosure displays improved/increased inhibition of inflammation as compared to wildtype human ADAMTS13, and/or the ADAMTS13 R568K/F592Y/R660K/Y661F/Y665F variant described in Jian et al., Blood (2012) 119: 3836-3843.

[0197] A given variant of ADAMTS13 may be evaluated for its ability to inhibit inflammation, and/or for the extent to which it inhibits inflammation, in a suitable in vitro or in vivo assay. An example of such an assay is described in Example 1 herein.

[0198] As described in the examples, magnetic resonance imaging (MRI) scans can be used to assess levels of inflammation. Other methods of assessing inflammation are known in the art.

[0199] In the examples, the efficacy of ADAMTS13 variants is defined as a reduction in R2* in MGE MRI scans (Indicating reduced vascular inflammation in the brain) and/or reduced reactive VWF species in the plasma.

[0200] In some embodiments, an ADAMTS13 variant according to the present disclosure inhibits inflammation to a level which is less than 1 times, e.g. one of ≤0.99 times, ≤0.95 times, ≤0.9 times, ≤0.85 times, ≤0.8 times, ≤0.75 times, ≤0.7 times, ≤0.65 times, ≤0.6 times, ≤0.55 times, ≤0.5 times, ≤0.45 times, ≤0.4 times, ≤0.35 times, ≤0.3 times, ≤0.25 times, ≤0.2 times, ≤0.15 times or ≤0.1 times the level to which inflammation is inhibited by wildtype human ADAMTS13 (e.g. a polypeptide comprising, or consisting of, the amino acid sequence of SEQ ID NO:1, 7 or 8) in the same assay.

[0201] In some embodiments, an ADAMTS13 variant according to the present disclosure inhibits inflammation to a level which is less than 1 times, e.g. one of ≤0.99 times, ≤0.95 times, ≤0.9 times, ≤0.85 times, ≤0.8 times, ≤0.75 times, ≤0.7 times, ≤0.65 times, ≤0.6 times, ≤0.55 times, ≤0.5 times, ≤0.45 times, ≤0.4 times, ≤0.35 times, ≤0.3 times, ≤0.25 times, ≤0.2 times, ≤0.15 times or ≤0.1 times the level to which inflammation is inhibited by the ADAMTS13 R568K/F592Y/R660K/Y661F/Y665F variant (e.g. a polypeptide comprising, or consisting of, the amino acid sequence of SEQ ID NO:71) in the same assay.

### Additional Sequences and Linkers

[0202] In some embodiments, ADAMTS13 variants according to the present disclosure may additionally comprise one or more further amino acids or sequences of amino acids.

[0203] In some embodiments, an ADAMTS13 variant according to the present disclosure comprise one or more linker sequences, e.g. between amino acid sequences of the ADAMTS13 variant. A linker sequence may be provided at one or both ends of one or more of a specified amino acid sequence of the ADAMTS13 variant.

[0204] Linker sequences are known to the skilled person, and are described, for example in Chen et al., Adv Drug Deliv Rev (2013) 65(10): 1357-1369, which is hereby incorporated by reference in its entirety. In some embodiments, a linker sequence may be a flexible linker sequence. Flexible linker sequences allow for relative movement of the amino acid sequences which are linked by the linker sequence. Flexible linkers are known to the skilled person, and several are identified in Chen et al., Adv Drug Deliv Rev (2013) 65(10): 1357-1369. Flexible linker sequences often comprise high proportions of glycine and/or serine residues.

[0205] In some embodiments, the linker sequence comprises at least one glycine residue and/or at least one serine residue. In some embodiments the linker sequence consists of glycine and serine residues. In some embodiments, the linker sequence comprises one or more copies (e.g. in tandem) of the sequence motif G₄S. In some embodiments, the linker sequence has a length of 1-2, 1-3, 1-4, 1-5, 1-10, 1-15, 1-20, 1-25, or 1-30 amino acids.

[0206] An ADAMTS13 variant may comprise amino acid sequence(s) to facilitate expression, folding, trafficking, processing, purification or detection of the polypeptide. For example, the ADAMTS13 variants may comprise a sequence encoding a His, (e.g. 6×His), Myc, GST, MBP, FLAG, HA, E, or Biotin tag, optionally at the N- or C-terminus of the polypeptide. By way of illustration, the ADAMTS13 variants exemplified herein comprise a C-terminal Myc/6×His tag.

[0207] In some embodiments, an ADAMTS13 variant further comprises a detectable moiety, e.g. a fluorescent, luminescent, immuno-detectable, radio, chemical, nucleic acid or enzymatic label.

[0208] In some embodiments, an ADAMTS13 variant further comprises a signal peptide (also known as a leader sequence or signal sequence). Signal peptides normally consist of a sequence of 5-30 hydrophobic amino acids, which form a single alpha helix. Secreted proteins and proteins expressed at the cell surface often comprise signal peptides.

[0209] The signal peptide may be present at the N-terminus of the polypeptide, and may be present in the newly-synthesised polypeptide. The signal peptide provides for efficient trafficking and secretion of the polypeptide. Signal peptides are often removed by cleavage, and thus are not comprised in the mature polypeptide secreted from the cell expressing the polypeptide.

[0210] Signal peptides are known for many proteins, and are recorded in databases such as GenBank, UniProt, Swiss-Prot, TrEMBL, Protein Information Resource, Protein Data Bank, Ensembl, and InterPro, and/or can be identified/predicted e.g. using amino acid sequence analysis tools such as SignalP (Petersen et al., 2011 Nature Methods 8: 785-786) or Signal-BLAST (Frank and Sippl, 2008 Bioinformatics 24: 2172-2176). In some embodiments, the signal peptide comprises or consists of an amino acid sequence having at least 60%, preferably one of 65%, 70%, 75%, 80%, 85%, 90%, 91%, 92%, 93%, 94%, 95%, 96%, 97%, 98%, 99% or greater amino acid sequence identity to SEQ ID NO:5.

### Labels and Conjugates

[0211] In some embodiments, an ADAMTS13 variant according to the present disclosure additionally comprises a label or conjugate.

[0212] In some embodiments, the detectable moiety may be a fluorescent label, phosphorescent label, luminescent label, immuno-detectable label (e.g. an epitope tag), radiolabel, chemical, nucleic acid or enzymatic label. The ADAMTS13 variant may be covalently or non-covalently labelled with the detectable moiety.

[0213] Fluorescent labels include e.g. fluorescein, rhodamine, allophycocyanin, eosine and NDB, green fluorescent protein (GFP), chelates of rare earths such as europium (Eu), terbium (Tb) and samarium (Sm), tetramethyl rhodamine, Texas Red, 4-methyl umbelliferone, 7-amino-4-methyl coumarin, Cy3, and Cy5. Radiolabels include radioisotopes such as Iodine¹²³, Iodine¹²⁵, Iodine¹²⁶, Iodine¹³¹, Iodine¹³³, Bromine⁷⁷, Technetium^{99m}, Indium¹¹¹, Indium^{113m}, Gallium⁶⁷, Gallium⁶⁸, Ruthenium⁹⁵, Ruthenium⁹⁷, Ruthenium¹⁰³, Ruthenium¹⁰⁵, Mercury²⁰⁷, Mercury²⁰³, Rhenium^{99m}, Rhenium¹⁰¹, Rhenium¹⁰⁵, Scandium⁴⁷, Tellurium^{121m}, Tellurium^{122m}, Tellurium^{125m}, Thulium¹⁶⁵, Thulium¹⁶⁷, Thulium¹⁶⁸, Copper⁶⁷, Fluorine¹⁸, Yttrium⁹⁰, Palladium¹⁰⁰, Bismuth²¹⁷ and Antimony²¹¹. Luminescent labels include as radioluminescent, chemiluminescent (e.g. acridinium ester, luminol, Isoluminol) and bioluminescent labels. Immuno-detectable labels include haptens, peptides/polypeptides, antibodies, receptors and ligands such as biotin, avidin, streptavidin or digoxigenin. Nucleic acid labels include aptamers. Enzymatic labels include e.g. peroxidase, alkaline phosphatase, glucose oxidase, beta-galactosidase and luciferase.

[0214] In some embodiments, the ADAMTS13 variant is conjugated to a chemical moiety. The chemical moiety may be a moiety for providing a therapeutic effect. Antibody-drug conjugates are reviewed e.g. in Parslow et al., Biomedicines. 2016 September; 4(3):14. In some embodiments, the chemical moiety may be a drug moiety (e.g. a cytotoxic agent). In some embodiments, the drug moiety may be a chemotherapeutic agent. In some embodiments, the drug moiety is selected from calicheamicin, DM1, DM4, monomethylauristatin E (MMAE), monomethylauristatin F (MMAF), SN-38, doxorubicin, duocarmycin, D6.5 and PBD.

### Nucleic Acids, Cells, Compositions and Kits

[0215] The present disclosure provides a nucleic acid encoding a polypeptide or according to the present disclosure. In some embodiments the nucleic acid comprises or consists of DNA and/or RNA.

[0216] The present disclosure also provides a vector comprising the nucleic acid according to the present disclosure.

[0217] Nucleic acids and vectors according to the present disclosure may be provided in purified or isolated form, i.e. from other nucleic acid, or naturally-occurring biological material.

[0218] The nucleotide sequence may be contained in a vector, e.g. an expression vector. A “vector” as used herein is a nucleic acid molecule used as a vehicle to transfer exogenous nucleic acid into a cell. The vector may be a vector for expression of the nucleic acid in the cell. Such vectors may include a promoter sequence operably linked to the nucleotide sequence encoding the sequence to be expressed. A vector may also include a termination codon and expression enhancers. Any suitable vectors, promoters, enhancers and termination codons known In the art may be used to express a peptide or polypeptide from a vector according to the present disclosure.

[0219] The term “operably linked” may include the situation where a selected nucleic acid sequence and regulatory nucleic acid sequence (e.g. promoter and/or enhancer) are covalently linked in such a way as to place the expression of nucleic acid sequence under the influence or control of the regulatory sequence (thereby forming an expression cassette). Thus a regulatory sequence is operably linked to the selected nucleic acid sequence if the regulatory sequence is capable of effecting transcription of the nucleic acid sequence. The resulting transcript(s) may then be translated into a desired peptide/polypeptide.

[0220] The nucleic acid and/or vector according to the present disclosure is preferably provided for introduction into a cell. Suitable vectors include plasmids, binary vectors, DNA vectors, mRNA vectors, viral vectors (e.g. gammaretroviral vectors (e.g. murine Leukemia virus (MLV)-derived vectors), lentiviral vectors, adenovirus vectors, adeno-associated virus vectors, vaccinia virus vectors and herpesvirus vectors), transposon-based vectors, and artificial chromosomes (e.g. yeast artificial chromosomes), e.g. as described in Maus et al., Annu Rev Immunol (2014) 32:189-225 or Morgan and Boyerinas, Biomedicines 2016 4, 9, which are both hereby incorporated by reference in its entirety.

[0221] In some embodiments, the vector may be a eukaryotic vector, e.g. a vector comprising the elements necessary for expression of protein from the vector in a eukaryotic cell. In some embodiments, the vector may be a mammalian vector, e.g. comprising a cytomegalovirus (CMV) or SV40 promoter to drive protein expression. In some embodiments, the viral vector may be a lentiviral, retroviral, adenoviral, or Herpes Simplex Virus vector. In some embodiments, the lentiviral vector may be pELNS, or may be derived from pELNS.

[0222] In some embodiments, the nucleic acid according to the present disclosure comprises, or consists of, a nucleic acid sequence having at least 60%, 65%, 70%, 75%, 80%, 85%, 86%, 87%, 88%, 89%, 90%, 91%, 92%, 93%, 94%, 95%, 96%, 97%, 98%, 99%, or 100% sequence identity to SEQ ID NOs:86, 87, 88, 89, 90, 91, 92, 93, 94 or 95 or to a nucleic acid sequence encoding the same amino acid sequence as one of SEQ ID NOs:86, 87, 88, 89, 90, 91, 92, 93, 94 or 95 as a result of codon degeneracy.

### Cells Comprising/Expressing ADAMTS13 Variants

[0223] The present disclosure also provides a cell comprising or expressing an ADAMTS13 variant according to the present disclosure. Also provided is a cell comprising or expressing a nucleic acid or a vector according to the present disclosure. The cell comprising or expressing an ADAMTS13 variant, nucleic acid or vector according to the present disclosure may secrete an ADAMTS13 variant according to the present disclosure. That is, expression of an ADAMTS13 variant, nucleic acid or vector may result in the soluble production of an ADAMTS13 variant according of the present disclosure from the cell.

[0224] The cell may be a eukaryotic cell, e.g. a mammalian cell. The mammal may be a primate (rhesus, cynomolgous, non-human primate or human) or a non-human mammal (e.g. rabbit, guinea pig, rat, mouse or other rodent (including any animal in the order Rodentia), cat, dog, pig, sheep, goat, cattle (including cows, e.g. dairy cows, or any animal in the order Bos), horse (including any animal in the order Equidae), donkey, and non-human primate).

[0225] In some embodiments, the cell is, or is derived from, a cell type commonly used for the expression of polypeptides for use in therapy in humans. Exemplary cells are described e.g. In Kunert and Reinhart, Appl Microbiol Biotechnol. (2016) 100:3451-3461 (hereby incorporated by reference in its entirety), and include e.g. CHO, HEK 293, PER.C6, NS0 and BHK cells.

[0226] The present disclosure also provides a method for producing a cell comprising a nucleic acid(s) or vector(s) according to the present disclosure, comprising introducing a nucleic acid or a vector according to the present disclosure into a cell. In some embodiments, introducing an isolated nucleic acid(s) or vector(s) according to the present disclosure into a cell comprises transformation, transfection, electroporation or transduction (e.g. retroviral transduction).

[0227] The present disclosure also provides a method for producing a cell expressing/comprising an ADAMTS13 variant according to the present disclosure, comprising introducing a nucleic acid or a vector according to the present disclosure in a cell. In some embodiments, the methods additionally comprise culturing the cell under conditions suitable for expression of the nucleic acid(s) or vector(s) by the cell. In some embodiments, the methods are performed in vitro.

[0228] The present disclosure also provides cells obtained or obtainable by the methods according to the present disclosure.

### Producing the ADAMTS13 Variants

[0229] ADAMTS13 variants according to the present disclosure may be prepared according to methods for the production of polypeptides known to the skilled person.

[0230] Polypeptides may be prepared by chemical synthesis, e.g. liquid or solid phase synthesis. For example, peptides/polypeptides can by synthesised using the methods described in, for example, Chandrudu et al., Molecules (2013), 18: 4373-4388, which is hereby incorporated by reference in its entirety.

[0231] Alternatively, polypeptides may be produced by recombinant expression. Molecular biology techniques suitable for recombinant production of polypeptides are well known in the art, such as those set out in Green and Sambrook, Molecular Cloning: A Laboratory Manual (4th Edition), Cold Spring Harbor Press, 2012, and in Nat Methods. (2008); 5(2): 135-146 both of which are hereby incorporated by reference in their entirety.

[0232] For recombinant production according to the present disclosure, any cell suitable for the expression of polypeptides may be used. The cell may be a prokaryote or eukaryote. In some embodiments the cell is a prokaryotic cell, such as a cell of archaea or bacteria. In some embodiments the bacteria may be Gram-negative bacteria such as bacteria of the family Enterobacteriaceae, for example Escherichia coli. In some embodiments, the cell is a eukaryotic cell such as a yeast cell, a plant cell, Insect cell or a mammalian cell, e.g. a cell described hereinabove.

[0233] In some cases, the cell is not a prokaryotic cell because some prokaryotic cells do not allow for the same folding or post-translational modifications as eukaryotic cells. In addition, very high expression levels are possible In eukaryotes and proteins can be easier to purify from eukaryotes using appropriate tags. Specific plasmids may also be utilised which enhance secretion of the protein into the media.

[0234] Production may involve culture or fermentation of a eukaryotic cell modified to express the polypeptide(s) of interest. The culture or fermentation may be performed in a bioreactor provided with an appropriate supply of nutrients, air/oxygen and/or growth factors. Secreted proteins can be collected by partitioning culture media/fermentation broth from the cells, extracting the protein content, and separating individual proteins to isolate secreted polypeptide(s). Culture, fermentation and separation techniques are well known to those of skill in the art, and are described, for example, in Green and Sambrook, Molecular Cloning: A Laboratory Manual (4th Edition; incorporated by reference herein above).

[0235] Bioreactors include one or more vessels in which cells may be cultured. Culture in the bioreactor may occur continuously, with a continuous flow of reactants into, and a continuous flow of cultured cells from, the reactor. Alternatively, the culture may occur in batches. The bioreactor monitors and controls environmental conditions such as pH, oxygen, flow rates into and out of, and agitation within the vessel such that optimum conditions are provided for the cells being cultured.

[0236] Following culturing the cells that express the polypeptide(s) of interest may be isolated. Any suitable method for separating proteins from cells known in the art may be used. In order to isolate the polypeptide, it may be necessary to separate the cells from nutrient medium. If the polypeptide(s) are secreted from the cells, the cells may be separated by centrifugation from the culture media that contains the secreted polypeptide(s) of interest. If the polypeptide(s) of interest collect within the cell, protein isolation may comprise centrifugation to separate cells from cell culture medium, treatment of the cell pellet with a lysis buffer, and cell disruption e.g. by sonification, rapid freeze-thaw or osmotic lysis.

[0237] It may then be desirable to isolate the polypeptide(s) of interest from the supernatant or culture medium, which may contain other protein and non-protein components. A common approach to separating protein components from a supernatant or culture medium is by precipitation. Proteins of different solubilities are precipitated at different concentrations of precipitating agent such as ammonium sulfate. For example, at low concentrations of precipitating agent, water soluble proteins are extracted. Thus, by adding different increasing concentrations of precipitating agent, proteins of different solubilities may be distinguished. Dialysis may be subsequently used to remove ammonium sulfate from the separated proteins.

[0238] Other methods for isolating/purifying polypeptides are known in the art, for example ion exchange chromatography and size chromatography. The polypeptide may also be affinity-purified using an appropriate binding partner for a molecular tag on the polypeptide (e.g. a His, FLAG, Myc, GST, MBP, HA, E, or Biotin tag). These techniques be used as an alternative to precipitation, or may be performed subsequently to precipitation. In some cases it may further be desired to process the polypeptide, e.g. to remove a sequence of amino acids, molecular tag, moiety, etc.

[0239] In some embodiments, treatment is with an appropriate endopeptidase for the cleavage and removal of an amino acid sequence. In some embodiments, treatment is with an enzyme to remove the moiety of interest. In some embodiments, the polypeptide is treated to remove glycans (i.e. the polypeptide is deglycosylated), e.g. by treatment with a glycosidase such as with a Peptide:N-glycosidase (PNGase).

[0240] Other methods for distinguishing different proteins are known in the art, for example ion exchange chromatography and size chromatography. These may be used as an alternative to precipitation or may be performed subsequently to precipitation.

[0241] Once the polypeptide(s) of interest have been isolated from culture it may be desired or necessary to concentrate the polypeptide(s). A number of methods for concentrating proteins are known in the art, such as ultrafiltration or lyophilisation.

[0242] In some embodiments, the production of the polypeptide occurs in vivo, e.g. after introduction to the host of a cell comprising a nucleic acid or vector encoding an ADAMTS13 variant of the present disclosure, or following introduction into a cell of the host of a nucleic acid or vector encoding an ADAMTS13 variant of the present disclosure. In such embodiments, the polypeptide is transcribed, translated and post-translationally processed to the mature polypeptide. In some embodiments, the polypeptide is produced in situ at the desired location in the host.

### Compositions

[0243] The present disclosure also provides compositions comprising the ADAMTS13 variants, nucleic acids, expression vectors and cells described herein.

[0244] The ADAMTS13 variants, nucleic acids, expression vectors and cells described herein may be formulated as pharmaceutical compositions or medicaments for clinical use and may comprise a pharmaceutically acceptable carrier, diluent, excipient or adjuvant. The composition may be formulated for topical, parenteral, systemic, Intracavitary, Intravenous, Intra-arterial, Intramuscular, Intrathecal, Intraocular, intraconjunctival, intratumoral, subcutaneous, intradermal, intrathecal, oral or transdermal routes of administration which may include injection or infusion.

[0245] Suitable formulations may comprise an ADAMTS13 variant in a sterile or isotonic medium. Medicaments and pharmaceutical compositions may be formulated in fluid, including gel, form. Fluid formulations may be formulated for administration by injection or infusion (e.g. via catheter) to a selected region of the human or animal body.

[0246] In some embodiments the composition is formulated for injection or infusion, e.g. into a blood vessel or tissue/organ of interest.

[0247] The present disclosure also provides methods for the production of pharmaceutically useful compositions, such methods of production may comprise one or more steps selected from: producing an ADAMTS13 variant, nucleic acid, expression vector or cell described herein; isolating an ADAMTS13 variant, nucleic acid, expression vector or cell described herein; and/or mixing an ADAMTS13 variant, nucleic acid, expression vector or cell described herein with a pharmaceutically acceptable carrier, adjuvant, excipient or diluent.

[0248] For example, a further aspect the present disclosure provides a method of formulating or producing a medicament or pharmaceutical composition for use in the treatment of a disease/condition (e.g. a disease described hereinbelow), the method comprising formulating a pharmaceutical composition or medicament by mixing an ADAMTS13 variant, nucleic acid, expression vector or cell described herein with a pharmaceutically acceptable carrier, adjuvant, excipient or diluent.

[0249] In aspects and embodiments of the present disclosure, an ADAMTS13 variant may be provided in a composition comprising particular chemical constituents in specified concentrations/proportions.

[0250] In some embodiments, an ADAMTS13 variant is provided in a buffer. As used herein, a “buffer” refers to a buffered solution that resists changes in pH by the action of its acid-base conjugate components. A buffer of the present disclosure preferably has a pH in the range from about 4.5 to about 7.0, preferably from about 5.0 to about 6.5. Examples of buffers that will control the pH in this range include acetate, histidine, histidine-arginine, histidine-methionine and other organic acid buffers.

### Kits

[0251] In some aspects of the present disclosure a kit of parts is provided. In some embodiments the kit may have at least one container having a predetermined quantity of an ADAMTS13 variant, nucleic acid, expression vector, cell or composition described herein.

[0252] In some embodiments, the kit may comprise materials for producing an ADAMTS13 variant, nucleic acid, expression vector, cell or composition described herein. For example, the kit may comprise materials for modifying a cell to express or comprise an ADAMTS13 variant, nucleic acid, expression vector, according to the present disclosure, or materials for introducing into a cell the nucleic acid, expression vector, according to the present disclosure.

[0253] The kit may provide an ADAMTS13 variant, nucleic acid, expression vector, cell or composition together with instructions for administration to a patient in order to treat or prevent a specified disease/condition, e.g. a disease/condition described hereinbelow.

[0254] In some embodiments the kit may further comprise at least one container having a predetermined quantity of another therapeutic/prophylactic agent (e.g. a therapeutic/prophylactic agent for the treatment/prevention of a disease/condition described herein). In such embodiments, the kit may also comprise a second medicament or pharmaceutical composition such that the two medicaments or pharmaceutical compositions may be administered simultaneously or separately such that they provide a combined treatment/prevention for the specific disease or condition.

### Therapeutics and Prophylactic Applications

[0255] The ADAMTS13 variants, nucleic acids, vectors, cells and pharmaceutical compositions described herein find use in therapeutic and prophylactic methods.

[0256] The present disclosure provides an ADAMTS13 variant, nucleic acid, vector, cell or pharmaceutical composition according to the present disclosure for use in a method of medical treatment or prophylaxis. The present disclosure also provides the use of an ADAMTS13 variant, nucleic acid, vector, cell or pharmaceutical composition according to the present disclosure in the manufacture of a medicament for treating or preventing a disease or condition. The present disclosure also provides a method of treating or preventing a disease or condition, comprising administering to a subject a therapeutically or prophylactically effective amount of an ADAMTS13 variant, nucleic acid, vector, cell or pharmaceutical composition according to the present disclosure.

[0257] The methods may be effective to reduce the development or progression of a disease/condition, alleviation of the symptoms of a disease/condition or reduction in the pathology of a disease/condition. The methods may be effective to prevent progression of the disease/condition, e.g. to prevent worsening of, or to slow the rate of development of, the disease/condition. In some embodiments the methods may lead to an improvement in the disease/condition, e.g. a reduction in the symptoms of the disease/condition or reduction in some other correlate of the severity/activity of the disease/condition. In some embodiments the methods may prevent development of the disease/condition a later stage (e.g. a chronic stage).

[0258] It will be appreciated that the articles of the present disclosure may be used for the treatment/prevention of any disease/condition that would derive therapeutic or prophylactic benefit from a reduction in the level and/or activity of VWF, and/or the level and/or activity of a complex comprising VWF (e.g. a multimeric complex, e.g. UL-VWF multimers). For example, the disease/condition may be a disease/condition in which VWF and/or a complex comprising VWF are pathologically implicated, e.g. a disease/condition in which an increased level of VWF and/or a complex comprising VWF is positively associated with the onset, development or progression of the disease/condition, and/or severity of one or more symptoms of the disease/condition, or for which an increased level of VWF and/or a complex comprising VWF is a risk factor for the onset, development or progression of the disease/condition.

[0259] In particular, the articles of the present disclosure may be used for the treatment/prevention of any disease/condition that would derive therapeutic or prophylactic benefit from inhibition of thrombosis. For example, the disease/condition may be a disease/condition in which thrombosis is pathologically implicated, e.g. a disease/condition in which thrombosis is positively associated with the onset, development or progression of the disease/condition, and/or severity of one or more symptoms of the disease/condition, or for which thrombosis is a risk factor for the onset, development or progression of the disease/condition.

[0260] It will also be appreciated that the articles of the present disclosure may be used for the treatment/prevention of any disease/condition that would derive therapeutic or prophylactic benefit from an increased level of ADAMTS13 or ADAMTS13 proteolytic activity. For example, the disease/condition may be a disease/condition in deficiency/insufficiency of ADAMTS13 or ADAMTS13 proteolytic activity is pathologically implicated, e.g. a disease/condition In which a decrease In the level of ADAMTS13 and/or a decrease in the level of ADAMTS13 proteolytic activity is positively associated with the onset, development or progression of the disease/condition, and/or severity of one or more symptoms of the disease/condition, or for which a decrease in the level of ADAMTS13 and/or a decrease in the level of ADAMTS13 proteolytic activity is a risk factor for the onset, development or progression of the disease/condition.

[0261] In some embodiments, the disease/condition to be treated/prevented in accordance with the present disclosure is a disease/condition characterised by an increase in the level of VWF and/or a complex comprising VWF, e.g. as compared to the level of VWF and/or a complex comprising VWF in the absence of the disease/condition.

[0262] In particular, the ADAMTS13 variants, nucleic acids, vectors, cells and pharmaceutical compositions according to the present disclosure find use to treat or prevent diseases/conditions associated with VWF and/or a complex comprising VWF, e.g. diseases associated with elevated levels or activity of VWF and/or a complex comprising VWF.

[0263] In accordance with various aspects of the present disclosure, a method of treating and/or preventing a disease/condition described herein may comprise one or more of the following: reducing the level or activity of VWF, reducing the level or activity of a complex comprising VWF; reducing the level of a correlate of the level or activity of VWF, reducing the level of a correlate of the level or activity of a complex comprising VWF, reducing or inhibiting thrombosis; reducing or inhibiting blood clotting/coagulation; reducing or inhibiting inflammation; increasing the level of ADAMTS13 proteolytic activity, Increasing proteolysis of VWF and/or complexes comprising VWF.

[0264] Thrombotic thrombocytopenic purpura (TTP) is characterised by a severe deficiency In ADAMTS13 either through acquired auto-antibodies that inhibit function or enhance clearance (idiopathic) or through loss of functional mutations in the ADAMTS13 gene (congenital). Acute episodes feature disseminated UL-VWF rich microthrombi leading to multiple organ ischemia and mortality In 20% of patients with a high risk of reoccurring relapses in those who survive. Current therapies include time-consuming plasma infusions which replenish functional ADAMTS13 levels but run the risk of introducing further complications including severe allergic reactions, volume overload and harmful blood-borne diseases (Sadler 2008; Kremer Hovinga et al. 2017). Recombinant human ADAMTS13 (Bax930—NCT03393975) is shown to have a comparable half-life and pharmacokinetic profile to plasma-derived ADAMTS13 and is currently In phase 3 clinical trials for patients with congenital TTP (Scully et al. 2017). However, using an improved ADAMTS13 variant in this setting has the potential to further reduce dosage and hospital stays and broaden treatment options appropriate to idiopathic TTP if the variant is unrecognisable to wildtype ADAMTS13 auto-antibodies.

[0265] Subarachnoid haemorrhage (SAH) accounts for 5% of all strokes and is associated with very poor outcomes with fatality rates in 35% in the first three months and only ˜55% of patients regaining independent function (Macdonald and Schweizer 2017). Following the early phase of brain injury one third of patients experience delayed cerebral ischemia caused by microthrombosis 3-14 days after haemorrhage leading to further inflammation and neurological deterioration. SAH patient studies reveal elevated VWF and lowered ADAMTS13 levels following bleeding compared to healthy controls (Kumar et al. 2017). Protection against microglial activation and neuronal injury is observed in VWF deficient mice post-SAH (Wan et al. 2018) and systemic administration of ADAMTS13 ameliorated microthrombosis, apoptosis and neuroinflammation, Improving neurological function (Muroi et al. 2014). Evidence also suggests a role of the ADAMTS13-VWF axis in intracerebral haemorrhage (ICH). Recombinant ADAMTS13 was shown to decrease microglial activation, neutrophil accumulation, protect against blood brain barrier breakdown and improve neurological outcomes in a murine ICH model (Cai et al. 2015).

[0266] Chronic Thromboembolic Pulmonary Hypotension (CTEPH) Is a progressive disease caused by disseminated thrombi in the pulmonary vasculature, which if left untreated can lead to right-sided heart failure. Newnham and colleagues demonstrated CTEPH patients have decreased ADAMTS13 and increased VWF plasma levels compared to healthy controls (Newnham et al. 2019). Currently, removal of pulmonary obstructions by surgery is the definitive treatment option for CTEPH however the potential thrombolytic use of ADAMTS13 could circumvent problems which exist with operability.

[0267] The importance of VWF-ADAMTS13 in murine models of Myocardial Infarction (MI) has been clearly demonstrated (Witsch et al. 2018). A meta-analysis of patient data described low levels of ADAMTS13 associated with increased risk of MI, however, the study did not find a synergy with high VWF levels conflicting with the relationship seen in ischemic stroke (Maino et al. 2015). In ST-elevation myocardial infarction (STEMI) patients, MI is associated with higher VWF and lower ADAMTS13 activity, however administration of recombinant ADAMTS13 in a porcine model of acute MI showed no effect on infarct size (Eerenberg et al. 2016). In unstable angina (UA) patients, an unfavourable VWF:ADAMTS13 ratio remained for up to 6 months after the acute phase, indicating a prolonged period of thrombogenicity and increased potential of platelet clot formation In the chronic phase (Fuchigami et al. 2008).

[0268] ADAMTS13 deficiency has also been linked to other ischemia/reperfusion pathologies. Using data from the Rotterdam Study, a general population based study In the Netherlands, Sedaghat et al found that higher VWF ADAMTS13 ratio and lower ADAMTS13 levels are independently associated with a steeper decline in kidney function (Sedaghat et al. 2016). More recently, using murine models of kidney ischemia/reperfusion injury two parallel studies demonstrated the protective action of recombinant ADAMTS13 in alleviating immune cell infiltration and kidney damage (Zhou et al. 2019; Ono et al. 2019). These results are corroborated in VWF−/− mice which sustain less kidney damage than wildtype controls (Ono et al. 2019). In addition, Urisono et al., report on partial protection against hepatic ischemia/reperfusion injury in VWF−/− mice compared to wildtype controls (Urisono et al. 2018).

[0269] In diabetic patients, clinical reports suggest an association between low levels of ADAMTS13 and microvascular complications such as nephropathy (kidney disease) (Taniguchi et al. 2010). Interestingly, one study demonstrated an ADAMTS13 single nucleotide polymorphism [Pro618Ala] reduced the proteolytic activity of ADAMTS13 and was associated with increased incidence of renal and cardiovascular events in type 2 diabetic patients (Rurali et al. 2013). Animal models show decreased kidney function is exacerbated by ADAMTS13 deficiency In wildtype mice and ameliorated In ADAMTS13−/− VWF−/− double knockout mice, displaying a VWF dependent effect (Dhanesha et al. 2017). These results indicate the VWF-ADAMTS13 axis is responsible at least in part for the endothelial dysfunction which occurs in diabetic vascular pathology and that patients could benefit from ADAMTS13 therapy.

[0270] Almost 30 years ago the BMJ reported that patients with Crohn's Disease, ulcerative colitis and bacterial diarrhoea have higher levels of circulating VWF (Stevens et al. 1992). More recently, a murine model of colitis demonstrated enhanced VWF-rich thrombi in the colon and propagation of intestinal inflammation in ADAMTS13 deficient mice which was reduced upon administration of recombinant human ADAMTS13. The same paper also identified areas of marked VWF staining in human colitis colonic tissue compared to healthy controls, providing a strong case for VWF-ADAMTS13 imbalance in exacerbation of inflammatory bowel disease (Zitomersky et al. 2017). The proposed mechanism of increased VWF release from the colonic endothelium, thrombocytosis, ischemia and further VWF release presents an opportunity for an ADAMTS13 intervention aimed at breaking this vicious cycle and limiting further detrimental inflammation. It is likely that there are still many undocumented indications for therapeutic use of ADAMTS13 given that much of the research discussed here has been conducted only in the last 5 years. Analysis of population data, such as that provided by The Rotterdam Study, can help to pinpoint certain diseases where abnormal VWF or ADAMTS13 activity might play a role in pathology. Indeed analysis of data collected in the same study highlighted a link between low ADAMTS13 levels and risk of dementia (Wolters et al. 2018). As research continues to identify pathological inflammation as an instigator in a wide variety of diseases, applications such as this one could prove to be invaluable in multiple settings.

[0271] In some embodiments, the disease/condition to be treated/prevented in accordance with the present disclosure is characterised by an increased level and/or activity of VWF, and/or an increased level and/or activity of a complex comprising VWF (e.g. as compared to the level in the healthy state (i.e. in the absence of the disease/condition)). In some embodiments, the disease/condition to be treated/prevented is characterised by a reduced level of ADAMTS13 and/or a reduced level of ADAMTS13 proteolytic activity (e.g. as compared to the level in the healthy state (i.e. in the absence of the disease/condition)). A reduced level of ADAMTS13 and/or a reduced level of ADAMTS13 proteolytic activity may be referred to herein as ‘ADAMTS13 insufficiency’.

[0272] In some embodiments, the articles of the present disclosure are provided for use in the treatment/prevention of thrombosis, or a disease/condition characterised by thrombosis. The articles of the present disclosure may be employed as anti-clotting/anti-coagulant agents.

[0273] In some embodiments, the articles of the present disclosure are provided for use in the treatment/prevention of inflammation, or a disease/condition characterised by inflammation.

[0274] In some embodiments, the disease/condition to be treated/prevented in accordance with the present disclosure selected from: a disease/condition characterised by thrombosis, a disease/condition characterised by inflammation, thrombotic thrombocytopenic purpura (TTP), ischaemic stroke, haemorrhagic stroke, subarachnoid haemorrhage (SAH), intracerebral haemorrhage (ICH), chronic thromboembolic pulmonary hypotension (CTEPH), myocardial infarction (MI), ST-elevation myocardial infarction (STEMI), unstable angina (UA), ischemia, reperfusion, deep venous thrombosis, pulmonary embolism, intravascular coagulation (DIC), hemolytic-uremic syndrome (HUS), cerebral infarction, systemic lupus erythematosus (SLE), disease cause by infection with a SARSr-CoV (e.g. SARS-CoV-2; e.g. COVID-19), acute respiratory distress syndrome (ARDS), pneumonia, kidney damage, nephropathy, microvascular diseases, dementia, Crohn's disease, inflammatory bowel disease, ulcerative colitis, and bacterial diarrhoea.

[0275] Administration of the articles of the present disclosure is preferably in a “therapeutically effective” or “prophylactically effective” amount, this being sufficient to show therapeutic or prophylactic benefit to the subject. The actual amount administered, and rate and time-course of administration, will depend on the nature and severity of the disease/condition and the particular article administered. Prescription of treatment, e.g. decisions on dosage etc., is within the responsibility of general practitioners and other medical doctors, and typically takes account of the disease/disorder to be treated, the condition of the individual subject, the site of delivery, the method of administration and other factors known to practitioners. Examples of the techniques and protocols mentioned above can be found in Remington's Pharmaceutical Sciences, 20th Edition, 2000, pub. Lippincott, Williams & Wilkins.

[0276] Administration may be alone or in combination with other treatments, either simultaneously or sequentially dependent upon the condition to be treated. The articles of the present disclosure and a therapeutic/prophylactic agent may be administered simultaneously or sequentially.

[0277] Simultaneous administration refers to administration of an ADAMTS13 variant, nucleic acid, vector, cell or composition of the disclosure and another therapeutic/prophylactic agent together, for example as a pharmaceutical composition containing both agents (combined preparation), or immediately after each other and optionally via the same route of administration, e.g. to the same artery, vein or other blood vessel. Sequential administration refers to administration of one of: (i) an ADAMTS13 variant, nucleic acid, vector, cell or composition of the disclosure and (ii) another therapeutic/prophylactic agent, followed after a given time interval by separate administration of the other agent. It is not required that the two agents are administered by the same route, although this is the case in some embodiments. The time interval may be any time interval.

[0278] Multiple doses of an ADAMTS13 variant, nucleic acid, vector, cell or composition of the disclosure may be provided. One or more, or each, of the doses may be accompanied by simultaneous or sequential administration of another therapeutic/prophylactic agent.

[0279] Multiple doses may be separated by a predetermined time interval, which may be selected to be one of 1, 2, 3, 4, 5, 6, 7, 8, 9, 10, 11, 12, 13, 14, 15, 16, 17, 18, 19, 20, 21, 22, 23, 24, 25, 26, 27, 28, 29, 30, or 31 days, or 1, 2, 3, 4, 5, or 6 months. By way of example, doses may be given once every 7, 14, 21 or 28 days (plus or minus 3, 2, or 1 days).

### Subjects

[0280] The subject in accordance with aspects of the present disclosure may be any animal or human. The subject is preferably mammalian, more preferably human. The subject may be a non-human mammal, but is more preferably human. The subject may be male or female. The subject may be a patient. A subject may have been diagnosed with a disease or condition requiring treatment (e.g. a cancer), may be suspected of having such a disease/condition, or may be at risk of developing/contracting such a disease/condition.

[0281] In embodiments according to the present disclosure the subject is preferably a human subject. In some embodiments, the subject to be treated according to a therapeutic or prophylactic method of the present disclosure is a subject having, or at risk of developing, a disease described herein. In embodiments according to the present disclosure, a subject may be selected for treatment according to the methods based on characterisation for certain markers of such disease/condition.

[0282] The features disclosed in the foregoing description, or in the following claims, or in the accompanying drawings, expressed in their specific forms or in terms of a means for performing the disclosed function, or a method or process for obtaining the disclosed results, as appropriate, may, separately, or in any combination of such features, be utilised for realising the disclosure in diverse forms thereof. While the disclosure has been described in conjunction with the exemplary embodiments described above, many equivalent modifications and variations will be apparent to those skilled in the art when given this disclosure. Accordingly, the exemplary embodiments of the disclosure set forth above are considered to be illustrative and not limiting. Various changes to the described embodiments may be made without departing from the spirit and scope of the disclosure.

[0283] For the avoidance of any doubt, any theoretical explanations provided herein are provided for the purposes of improving the understanding of a reader. The inventors do not wish to be bound by any of these theoretical explanations.

[0284] Any section headings used herein are for organizational purposes only and are not to be construed as limiting the subject matter described.

[0285] Throughout this specification, including the claims which follow, unless the context requires otherwise, the word “comprise” and “Include”, and variations such as “comprises”, “comprising”, and “Including” will be understood to imply the inclusion of a stated integer or step or group of integers or steps but not the exclusion of any other integer or step or group of integers or steps.

[0286] It must be noted that, as used in the specification and the appended claims, the singular forms “a,” “an,” and “the” Include plural referents unless the context clearly dictates otherwise. Ranges may be expressed herein as from “about” one particular value, and/or to “about” another particular value. When such a range is expressed, another embodiment includes from the one particular value and/or to the other particular value. Similarly, when values are expressed as approximations, by the use of the antecedent “about,” it will be understood that the particular value forms another embodiment. The term “about” in relation to a numerical value is optional and means for example +/−10%.

[0287] Where a nucleic acid sequence is disclosed herein, the reverse complement thereof is also expressly contemplated.

[0288] Methods described herein may preferably be performed in vitro. The term “in vitro” is intended to encompass procedures performed with cells in culture whereas the term “in vivo” is intended to encompass procedures with/on intact multi-cellular organisms.

### EXAMPLES

### Example 1—Materials and Methods

### Protein Expression and Purification

[0289] A pCDNA3.1 28 construct encoding recombinant human ADAMTS13 with a C-terminal Myc/His6 tag was used to generate variants by site-directed mutagenesis.

[0290] Constructs were generated encoding ADAMTS13 variants comprising the following substitutions in the linker 3 region of the ADAMTS13 protein: A1144V, A1145V, A1146V, P1147V, P1154V, P1171V, P1173V, P1175V, P1180V, and P1182V. A construct encoding the known ADAMTS13 R568K/F592Y/R660K/Y661F/Y665F variant was also produced.

[0291] The amino acid sequences of the Myc/His6-tagged human ADAMTS13 and ADAMTS13 variants characterised in the present Examples are shown in SEQ ID NOs:72 to 83, and the nucleotide sequences encoding the recombinant polypeptides are shown in SEQ ID NOs:84 to 95.

[0292] Myc/His6-tagged human ADAMTS13 and ADAMTS13 variants were expressed from CHO-K1 cell lines stably expressing constructs encoding the proteins, and subsequently purified by fast protein liquid chromatography (FPLC) with zinc-coupled HiTrap chelating columns (GE Healthcare, Chicago, IL, USA). CHO-expressed ADAMTS13, for use in the murine stroke model, was passed over a hydroxyapatite column to remove contaminating proteins, and the purified ADAMTS13 protein was quantified by ELISA and dialyzed into 150 mm NaCl, 20 mm histidine, 2% sucrose, and 0.05% Tween-80 (pH 7.4).

[0293] Corresponding constructs were also generated encoding ADAMTS13 variants comprising the following substitutions in the linker 3 region of the ADAMTS13 protein: A1144K, A1144I, A1145K, A1145I, A1146K, A1146I, P1147K, P1147I, P1154K, P1154I, P1171K, P1171I, P1173K, P1173I, P1175K, P1175I, P1180K, P1180I, P1182K, and P1182I. The amino acid sequences of these ADAMTS13 variants are shown in SEQ ID NOs:96 to 115, and the nucleotide sequences encoding the recombinant polypeptides are shown in SEQ ID NOs:116 to 135. These ADAMTS13 variants were transiently expressed in HEK293S cells and harvested in concentrated conditioned media. Protein levels were quantified by in-house ADAMTS13 ELISA and corroborated by western blot.

### FRETS-VWF73 Assay

[0294] FRETS-VWF73 assays of ADAMTS13-mediated proteolysis of VWF were performed as described in South et al., 2018.

[0295] Briefly, purified Myc/His6-tagged human ADAMTS13 and ADAMTS13 variants were diluted to a concentration of 0.3 nM in 5 mM Bis-Tris pH 6.0, 25 mM CaCl₂, and 0.005% Tween-20, in white 96-well plates (Nunc).

[0296] In some experiments, purified VWF D4-CK fragment may be added to a final concentration of 20-60 nM, followed by a 45 min preincubation at 37° C. In other experiments, VWF D4-CK fragment was not added.

[0297] Proteolysis was subsequently initiated by the addition of an equal volume of 4 μM FRETS-VWF73 substrate (Peptanova). Fluorescence (excitation, 340 nm; emission, 460 nm) was measured at 30° C. at 1 min intervals for 1 h using a Fluostar Omega plate reader (BMG Labtech). Fluorescence measurements were normalised to values obtained for wildtype human ADAMTS13.

[0298] Vena8 Fluoro+ biochips (Cellix) were coated with 200 μg/ml collagen type III (Southern Biotech) and blocked with 1% BSA, 1 mg/ml glucose in HEPES buffer. Washed platelets combined with red blood cells were treated with 100 nM PGE1 and 75 mU/ml Apyrase, to prevent platelet activation, before platelets were labelled with 10 μM DiOC₆. Platelets were supplemented with 10 μg/ml multimeric plasma VWF and perfused over the collagen surface at a constant shear rate of 1500 s-1 (at which platelet capture is VWF dependent) for 5 minutes. Adhesion of labelled platelets was visualised by fluorescence imaging at 250 ms intervals using a 20× objective and analysed using Slidebook software to determine platelet coverage (%) at 270 seconds. To determine the effect of ADAMTS13 on platelet capture the assay was also performed in the presence of WT or variant ADAMTS13 at a range of concentrations and EC₅₀ values were determined by dose-response curves.

### Murine Focal Ischemia Stroke Model

[0299] ADAMTS13 was administered as a bolus by tail vein catheter 1 hour after MCA occlusion. Dosage was 4 μl/g of a 1.5 mg/ml preparation to give a final dose of 6 mg/kg. FeCl3-induced occlusion of the middle cerebral artery (MCA) was performed using surgical techniques described previously (Denorme et al., 2016). Regional cerebral blood flow (rCBF) In the MCA territory was determined by Laser Speckle contrast imaging, and infarct size was determined 24 h after occlusion of the MCA by staining brain sections (10 μm PFA fixed cryosections) with cresyl violet. Brain sections were also stained with haematoxylin and eosin and by immunofluorescence using antibodies against VWF (Dako, rabbit polyclonal A0082) and fibrinogen (Thermo-Fisher, sheep polyclonal PA1-85429).

### Treatment of Respiratory Tract Infection

[0300] Mice were infected with a mildly virulent strain of Streptococcus pneumoniae (ascending inoculum over days 1-6), and administered on day 8 with human ADAMTS13, an ADAMTS13 variant or vehicle (as a negative control). Inflammation of the cerebral vasculature was determined at day 18 using gradient-echo MRI and a VWF-specific MPIO contrast agent.

[0301] ADAMTS13 was administered as a bolus by tail vein catheter on Day 8. Dosage was 4 μl/g of a 1.5 mg/ml preparation to give a final dose of 6 mg/kg. Amoxicillin, when used, was also administered on day 8 by a single subcutaneous injection at a final dosage of 400 mg/kg. Efficacy of caADAMTS13 in this model was defined as a reduction in R2* in MGE MRI scans (indicating reduced vascular inflammation in the brain) and/or reduced reactive VWF species in the plasma.

### FeCl3-Induced Occlusion of the Middle Cerebral Artery (MCA)

[0302] Mice are treated using surgical techniques described previously (Denorme et al., 2016) to induce occlusion of the MCA. Vehicle or caADAMTS13 (6 mg/kg) is administered as a bolus by tail vein catheter 4 hours after MCA occlusion. Regional cerebral blood flow (rCBF) in the MCA territory is determined by Laser Speckle contrast imaging for 1 hour following ADAMTS13 administration, and infarct size is determined 24 h after occlusion of the MCA by staining brain sections (10 μm PFA fixed cryosections) with cresyl violet. Brain sections are stained with haematoxylin and eosin and by immunofluorescence using antibodies against VWF (Dako, rabbit polyclonal A0082) and fibrinogen (Thermo-Fisher, sheep polyclonal PA1-85429).

### Example 2—Results

### In Vitro Activity

[0303] The proteolytic activity of wild type ADAMTS13, the known GoF ADAMTS13 R568K/F592Y/R660K/Y661F/Y665F variant and linker 3 variants was evaluated by FRETS-VWF73 assay in both the absence (−) and presence (+) of the activating VWF-D4CK domain fragment (FIG. 1A).

[0304] The residues targeted In the ADAMTS13 variants were selected on the basis of being those that are most likely to significantly influence the secondary structure and thereby, the activity of the protein. Specifically, the cluster of alanine residues (Ala1144Val, Ala1145Val and Ala1146Val) were selected on the basis that these residues may provide flexibility to the protein structure in this region. Subsequent proline residues (Pro1147Val, Pro1154Val, Pro1171Val, Pro1173Val, Pro1175Val, Pro1180Val, and Pro1182Val) were selected on the basis that these residues are likely to constrain and thereby strongly influence the secondary structure of the protein.

[0305] Indeed, the nature of the amino acid residues that were selected for introduction into the ADAMTS13 variants were not identified based on not the typical approach of chemical similarity (e.g. degree of charge and structure conservation), but based on the degree of flexibility provided by these residues. Specifically, in comparison to alanine, residues including, for example, lysine, valine, and isoleucine, have been found to significantly reduce flexibility, to an extent approaching that of proline.

[0306] A1144V, A11146V, P1180V, and P1182V displayed significantly higher proteolytic activity compared to wildtype ADAMTS13 and the R568K/F592Y/R660K/Y661F/Y665F variant (FIG. 1A). This significant difference was observed both in the absence (−) and presence (+) of the activating VWF-D4CK domain fragment. In the absence of the activating VWF-D4CK domain fragment, the proteolytic activity of A1144V, A1146V, P1180V, and P1182V variants was more than 4-fold higher than wildtype ADAMTS13.

[0307] Substitution of alanine at positions 1144 and 1146 with isoleucine, an amino acid with a similar rigidity to valine, induces a similar constitutive activity to that seen with the A1144V, A1146V variants (FIG. 1B). The replacement of valine with either lysine or isoleucine at positions 1180 and 1182 Induces greater than 10-fold increase in activity. This is higher than the P1180V and P1182V variants and higher than A1144V.

[0308] VWF-mediated capture of platelets under arterial shear stress was measured for wildtype ADAMTS13, the R568K/F592Y/R660K/Y661F/Y665F variant, and the A1144V variant. The results show that the A1144V variant was more effective at reducing platelet coverage than wildtype ADAMTS13 or the R568K/F592Y/R660K/Y661F/Y665F variant. The A1144V variant was able to reduce platelet coverage to a level comparable to the negative control condition at a concentration of 2.5 nM. The A1144V variant was found to be much more potent than wildtype ADAMTS13 or the R568K/F592Y/R660K/Y661F/Y665F variant at reducing platelet coverage in this assay.

### Results of Laser Speckle Contrast Analysis

[0309] Laser speckle contrast imaging provides a quantitative map of regional cerebral blood flow in the mouse brain. Flux values are derived from a region of interest (corresponding to the tissue supplied by the middle cerebral artery) in the ipsilateral (stroked) hemisphere and an identical control region in the contralateral hemisphere. A decrease in the ratio of these flux values indicates a drop in blood flow in the stroked hemisphere compared to the control region. Typically, the flux ratio is reduced to approximately 0.4 in an animal with MCAo compared to a value of 1 in sham animals. An increase in flux ratio over time, observed in animals treated with caADAMTS13, Indicates that the occlusive thrombus has been cleared and blood flow restored to the MCA territory.

### Lesion Volumes

[0310] FIGS. 6 to 9 show the effect of treatment with wildtype ADAMTS13 or the A1144V variant on lesion volumes in the ischemia stroke model, at 24 hours post-occlusion.

[0311] FIG. 7 shows that treatment with the A1144V variant (referred to in FIG. 7 as ‘caADAMTS13’) reduced lesion volume as compared to treatment with the vehicle control, N-acetyl-cysteine (NAC), or wildtype ADAMTS13 (wtADAMTS13).

[0312] Treatment with the A1144V variant was also found to result in a greater percentage increase the flux ratio between the ipsilateral and contralateral ROIs between 0 and 60 minutes after injection, than treatment with the vehicle control, N-acetyl-cysteine (NAC), or wildtype ADAMTS13 (wtADAMTS13) (FIG. 7).

[0313] A significant negative correlation was observed between the increase in flux ratio and lesion volume, across all treatment groups (FIG. 8).

[0314] An increase in flux ratio over time indicates that the occlusive thrombus has been cleared and blood flow restored to the MCA territory, thereby salvaging viable tissue as indicated by the correlating reduction in lesion volume.

### Residual Thrombus Content

[0315] FIGS. 10 and 11 show that VWF and fibrin(ogen) content at site of FeCl3 application is lower in brain sections obtained from mice treated with the A1144V variant (referred to as ‘caADAMTS13’) than treatment with the vehicle control, N-acetyl-cysteine (NAC), or wildtype ADAMTS13 (wtADAMTS13).

[0316] Thrombi are composed primarily of a combination of fibrin and VWF-platelet aggregates. Thrombus composition in humans can vary, with differing contributions of these two components, so that thrombolytics acting only on fibrin (rt-PA) or only on VWF (NAC, WT ADAMTS13) may not fully dissolve the occlusive thrombi. The reduction in both VWF and fibrin observed here, supports in vitro data indicating that caADAMTS13 is capable of proteolysing both VWF and fibrinogen thereby circumventing the issue of thrombus composition.

### Treatment of Respiratory Tract Infection

[0317] FIG. 12 shows the effect of treatment with wildtype ADAMTS13 or the A1144V variant on cerebral inflammation in mice infected with Streptococcus pneumoniae.

[0318] Animals treated with the A1144V variant (caADAMTS13)—either alone or in combination with amoxicillin—displayed a ˜50% reduction in cerebral inflammation.

[0319] In response to localised respiratory tract infection (RTI) there is release of large VWF multimers from the vasculature of the lung which circulate in the plasma. The infection also causes an increase in the plasma concentration of pro-inflammatory cytokines (IL-6, IL-1 etc) which can initiate vascular inflammation in other organs including the brain (FIGS. 12A and C). These changes are believed to be a major contributor to the increased risk of stroke observed in patents with preceding RTI which may account for as many as 10% of all strokes.

[0320] This response continues long after the infection is resolved by antibiotics with both plasma VWF and cerebral VWF levels remaining high (FIGS. 12B, C and D). By dampening this response, caADAMTS13 may represent a potential prophylactic option for the prevention of strokes triggered by RTI.

### FeCl3-Induced Occlusion of the Middle Cerebral Artery (MCA)

[0321] Treatment with caADAMTS13 elicits an increase in flux ratio over time (compared to vehicle control) indicating that the occlusive thrombus has been cleared and blood flow restored to the MCA territory, thereby salvaging viable tissue as indicated by a correlating reduction in lesion volume. Delayed administration does not result in haemorrhagic transformation as is the case for rT-PA.

### REFERENCES

[0322] A number of publications are cited above in order to more fully describe and disclose the invention and the state of the art to which the disclosure pertains. Full citations for these references are provided below. The entirety of each of these references is incorporated herein.
[0323] 1. Bhatia, R., M. D. Hill, N. Shobha, B. Menon, S. Bal, P. Kochar, T. Watson, M. Goyal, and A. M. Demchuk. 2010. ‘Low rates of acute recanalization with intravenous recombinant tissue plasminogen activator in ischemic stroke: real-world experience and a call for action’, Stroke, 41: 2254-8.
[0324] 2. Cal, P., H. Luo, H. Xu, X. Zhu, W. Xu, Y. Dal, J. Xiao, Y. Cao, Y. Zhao, B. Q. Zhao, and W. Fan. 2015. ‘Recombinant ADAMTS 13 Attenuates Brain Injury After Intracerebral Hemorrhage’, Stroke, 46:2647-53.
[0325] 3. Chauhan, A. K., J. Kisucka, A. Brill, M. T. Walsh, F. Scheiflinger, and D. D. Wagner. 2008. ‘ADAMTS13: a new link between thrombosis and inflammation’, J Exp Med, 205: 2065-74.
[0326] 4. L. Deforche, E. Roose, A. Vandenbulcke, N. Vandeputte, H. B. Feyst, T. A. Springer‡, L. Z. Mi, J. Muia§, J. E. Sadler§, K. Soejima, H. Rottensteiner, H. Deckmyn, S. F. De Meyer and K. Vanhoorelbeke. 2915. ‘Linker regions and flexibility around the metalloprotease domain account for conformational activation of ADAMTS13’ J Thromb Haemost. 13(11): 2063-2075. doi:10.111.1/jth.13149.
[0327] 5. Denorme, F., F. Langhauser, L. Desender, A. Vandenbulcke, H. Rottensteiner, B. Plaimauer, O. Francois, T. Andersson, H. Deckmyn, F. Scheiflinger, C. Kleinschnitz, K. Vanhoorebeke, and S. F. De Meyer. 2016. ‘ADAMTS13-mediated thrombolysis of t-PA-resistant occlusions in ischemic stroke in mice’, Blood, 127: 2337-45.
[0328] 6. De Meyer S F, Stoll G, Wagner D D, Kleinschnitz C. von Willebrand factor: an emerging target in stroke therapy. Stroke 2012; 43: 599-606.
[0329] 7. De Meyer S F, Savchenko A S, Haas M S, Schatzberg D, Carroll M C, Schiviz A, Dietrich B, Rottensteiner H, Scheiflinger F, Wagner D D. Protective anti-inflammatory effect of ADAMTS13 on myocardial ischemia/reperfusion injury in mice. Blood 2012; 120: 5217-23.
[0330] 8. Dhanesha, N., P. Doddapattar, M. R. Chorawala, M. K. Nayak, K. Kokame, J. M. Staber, S. R. Lentz, and A. K. Chauhan. 2017. ‘ADAMTS13 Retards Progression of Diabetic Nephropathy by Inhibiting Intrarenal Thrombosis In Mice’, Arterioscler Thromb Vasc Biol, 37:1332-38.
[0331] 9. Eerenberg, E. S., P. F. Teunissen, B. J. van den Born, J. C. Meijers, M. R. Hollander, M. Jansen, R. Tijssen, J. A. Belien, P. M. van de Von, M. F. Aly, O. Kamp, H. W. Niessen, P. W. Kamphuisen, M. Levi, and N. van Royen. 2016. ‘The role of ADAMTS13 in acute myocardial infarction: cause or consequence?’, Cardiovasc Res, 111: 194-203.
[0332] 10. Emberson, J., K. R. Lees, P. Lyden, L. Blackwell, G. Albers, E. Bluhmki, T. Brott, G. Cohen, S. Davis, G. Donnan, J. Grotta, G. Howard, M. Kaste, M. Koga, R. von Kummer, M. Lansberg, R. I. Lindley, G. Murray, J. M. Olivot, M. Parsons, B. Tilley, D. Toni, K. Toyoda, N. Wahigren, J. Wardlaw, W. Whiteley, G. J. del Zoppo, C. Baigent, P. Sandercock, W. Hacke, and Group Stroke Thrombolysis Trialists' Collaborative. 2014. ‘Effect of treatment delay, age, and stroke severity on the effects of intravenous thrombolysis with alteplase for acute ischaemic stroke: a meta-analysis of individual patient data from randomised trials’, Lancet, 384: 1929-35.
[0333] 11. Fuchigami, S., K. Kaikita, K. Soejima, M. Matsukawa, T. Honda, K. Tsujita, Y. Nagayoshi, S. Kojima, T. Nakagaki, S. Sugiyama, and H. Ogawa. 2008. ‘Changes in plasma von Willebrand factor-cleaving protease (ADAMTS13) levels in patients with unstable angina’, Thromb Res, 122: 618-23.
[0334] 12. Fujioka, M., K. Hayakawa, K. Mishima, A. Kunizawa, K. Irie, S. Higuchi, T. Nakano, C. Muroi, H. Fukushima, M. Sugimoto, F. Banno, K. Kokame, T. Miyata, M. Fujiwara, K. Okuchi, and K. Nishio. 2010. ‘ADAMTS13 gene deletion aggravates ischemic brain damage: a possible neuroprotective role of ADAMTS13 by ameliorating postischemic hypoperfusion’, Blood, 115: 1650-3.
[0335] 13. Jian, C., Xiao, J., Gong, L., Skipwith, C. G., Jin, S. Y., Kwaan, H. C., and Zheng, X. L. (2012) Gain-of-function ADAMTS13 variants that are resistant to autoantibodies against ADAMTS13 in patients with acquired thrombotic thrombocytopenic purpura. Blood 119, 3836-3843.
[0336] 14. Khan, M. M., D. G. Motto, S. R. Lentz, and A. K. Chauhan. 2012. ‘ADAMTS13 reduces VWF-mediated acute Inflammation following focal cerebral ischemia in mice’, J Thromb Haemost, 10: 1665-71.
[0337] 15. Kleinschnitz, C., S. F. De Meyer, T. Schwarz, M. Austinat, K. Vanhoorelbeke, B. Nieswandt, H. Deckmyn, and G. Stoll. 2009. ‘Deficiency of von Willebrand factor protects mice from ischemic stroke’, Blood, 113: 3600-3.
[0338] 16. Kolaczkowska, E., C. N. Jenne, B. G. Surewaard, A. Thanabalasuriar, W. Y. Lee, M. J. Sanz, K. Mowen, G. Opdenakker, and P. Kubes. 2015. ‘Molecular mechanisms of NET formation and degradation revealed by intravital imaging in the liver vasculature’, Nat Commun, 6: 6673.
[0339] 17. Kremer Hovinga, J. A., P. Coppo, B. Lammle, J. L. Moake, T. Miyata, and K. Vanhoorelbeke. 2017. ‘Thrombotic thrombocytopenic purpura’, Nat Rev Dis Primers, 3:17020.
[0340] 18. Kumar, M., W. Cao, J. K. McDaniel, H. P. Pham, D. Raju, K. Nawalinski, S. Frangos, D. Kung, E. Zager, S. E. Kasner, J. M. Levine, and X. L. Zheng. 2017. ‘Plasma ADAMTS13 activity and von Willebrand factor antigen and activity In patients with subarachnold haemorrhage’, Thromb Haemost, 117: 691-99.
[0341] 19. Macdonald, R. L., and T. A. Schweizer. 2017. ‘Spontaneous subarachnoid haemorrhage’, Lancet, 389: 655-66.
[0342] 20. Maino, A., B. Siegerink, L. A. Lotta, J. T. Crawley, S. le Cessie, F. W. Leebeek, D. A. Lane, G. D. Lowe, F. Peyvandi, and F. R. Rosendaal. 2015. ‘Plasma ADAMTS-13 levels and the risk of myocardial infarction: an individual patient data meta-analysis’, J Thromb Haemost, 13:1396-404.
[0343] 21. Martinod, K., and D. D. Wagner. 2014. ‘Thrombosis: tangled up in NETs’, Blood, 123: 2768-76.
[0344] 22. Moake J L, Rudy C K, Troll J H, Weinstein M J, Colannino N M, Azocar J, Seder R H, Hong S L, Deykin D (1982) N Engl J Med 307:1432-1435, pmid:6813740.
[0345] 23. Muroi, C., M. Fujioka, K. Mishima, K. Ire, Y. Fujimura, T. Nakano, J. Fandino, E. Keller, K. Iwasaki, and M. Fujiwara. 2014. ‘Effect of ADAMTS-13 on cerebrovascular microthrombosis and neuronal injury after experimental subarachnoid hemorrhage’, J Thromb Haemost, 12: 505-14.
[0346] 24. Nakano, T., K. Irie, K. Hayakawa, K. Sano, Y. Nakamura, M. Tanaka, Y. Yamashita, T. Satho, M. Fujioka, C. Muroi, K. Matsuo, H. Ishikura, K. Futagami, and K. Mishima. 2015. ‘Delayed treatment with ADAMTS13 ameliorates cerebral ischemic injury without hemorrhagic complication’, Brain Res, 1624: 330-35.
[0347] 25. National Institute of Neurological, Disorders, and P. A. Stroke Study Group Stroke rt. 1995. ‘Tissue plasminogen activator for acute ischemic stroke’, N Engl J Med, 333:1581-7.
[0348] 26. Newnham, M., K. South, M. Bleda, W. R. Auger, J. A. Barbera, H. Bogaard, K. Bunclark, J. E. Cannon, M. Delcroix, C. Hadinnapola, L. S. Howard, D. Jenkins, E. Mayer, C. Ng, C. J. Rhodes, N. Screaton, K. Sheares, M. A. Simpson, M. Southwood, L. Su, D. Taboada, M. Traylor, R. C. Trembath, S. S. Villar, M. R. Wilkins, J. Wharton, S. Graf, J. Pepke-Zaba, M. Laffan, D. A. Lane, N. W. Morrell, and M. Toshner. 2019. ‘The ADAMTS13-VWF axis is dysregulated in chronic thromboembolic pulmonary hypertension’, Eur Respir J, 53.
[0349] 27. Ono, S., H. Matsui, M. Noda, S. Kasuda, N. Yada, K. Yoshimoto, M. Akiyama, T. Miyata, M. Sugimoto, and K. Nishio. 2019. ‘Functional regulation of von Willebrand factor ameliorates acute ischemia-reperfusion kidney injury in mice’, Sci Rep, 9: 14453.
[0350] 28. Rurali, E., M. Noris, A. Chianca, R. Donadelli, F. Banterla, M. Galbusera, G. Gherardi, S. Gastoldi, A. Parvanova, I. Iliev, A. Bossi, C. Haefliger, R. Trevisan, G. Remuzzi, P. Ruggenenti, and Benedict Study Group. 2013. ‘ADAMTS13 predicts renal and cardiovascular events in type 2 diabetic patients and response to therapy’, Diabetes, 62: 3599-609.
[0351] 29. Sadler, J. E. 2008. ‘Von Willebrand factor, ADAMTS13, and thrombotic thrombocytopenic purpura’, Blood, 112:11-8.
[0352] 30. Sadler J. E. von Willebrand factor assembly and secretion. J Thromb Haemost 2009; 7(Suppl. 1): 24-7.
[0353] 31. Scully, M., P. Knobl, K. Kentouche, L. Rice, J. Windyga, R. Schneppenheim, J. A. Kremer Hovinga, M. Kajiwara, Y. Fujimura, C. Maggiore, J. Doralt, C. Hibbard, L. Martell, and B. Ewenstein. 2017. ‘Recombinant ADAMTS-13: first-in-human pharmacokinetics and safety in congenital thrombotic thrombocytopenic purpura’, Blood, 130: 2055-63.
[0354] 32. Sedaghat, S., P. S. de Vries, J. Boender, M. A. Sonneveld, E. J. Hoorn, A. Hofman, M. P. do Maat, O. H. Franco, M. A. Ikram, F. W. Leebeek, and A. Dehghan. 2016. ‘von Willebrand Factor, ADAMTS13 Activity, and Decline in Kidney Function: A Population-Based Cohort Study’, Am J Kidney Dis, 68: 726-32.
[0355] 33. Sonneveld, M. A., M. P. de Maat, M. L. Portegies, M. Kavousi, A. Hofman, P. L. Turecek, H. Rottensteiner, F. Schelflinger, P. J. Koudstaal, M. A. Ikram, and F. W. Leebeek. 2015. ‘Low ADAMTS13 activity is associated with an increased risk of ischemic stroke’, Blood, 126: 2739-46.
[0356] 34. South, K., M. O. Freitas, and D. A. Lane. 2016. ‘Conformational quiescence of ADAMTS-13 prevents proteolytic promiscuity’, J Thromb Haemost, 14: 2011-22.
[0357] 35. South et al. 2017. ‘A model for the conformational activation of the structurally quiescent metalloprotease ADAMTS13 by von Willebrand factor’, J Biol Chem, 292: 5760-69.
[0358] 36. South, K., B. M. Luken, J. T. Crawley, R. Phillips, M. Thomas, R. F. Collins, L. Deforche, K. Vanhoorelbeke, and D. A. Lane. 2014. ‘Conformational activation of ADAMTS13’, Proc Natl Acad Sci USA, 111: 18578-83.
[0359] 37. South et al. Journal of Thrombosis and Haemostasis, 16: 2289-2299 2018.
[0360] 38. South K, Freltas M O, Lane D A. A model for the conformational activation of the structurally quiescent metalloprotease ADAMTS13 by von Willebrand factor. J Biol Chem. 2018b; 293(4):1149-50.
[0361] 39. Stevens, T. R., J. P. James, N. J. Simmonds, D. A. McCarthy, I. F. Laurenson, P. J. Maddison, and D. S. Rampton. 1992. ‘Circulating von Willebrand factor in inflammatory bowel disease’, Gut, 33: 502-6.
[0362] 40. Stoll, G., and B. Nieswandt. 2019. ‘Thrombo-inflammation in acute ischaemic stroke—implications for treatment’, Nat Rev Neurol, 15: 473-81.
[0363] 41. Taniguchi, S., T. Hashiguchi, T. Ono, K. Takenouchi, K. Nakayama, T. Kawano, K. Kato, R. Matsushita, M. Nagatomo, S. Nakamura, T. Nakashima, and I. Maruyama. 2010. ‘Association between reduced ADAMTS13 and diabetic nephropathy’, Thromb Res, 125: e310-6.
[0364] 42. Taylor, A., C. Vendramin, D. Singh, M. M. Brown, and M. Scully. 2020. ‘von Willebrand factor/ADAMTS13 ratio at presentation of acute ischemic brain injury is predictive of outcome’, Blood Adv, 4:398-407.
[0365] 43. Urisono, Y., A. Sakata, H. Matsui, S. Kasuda, S. Ono, K. Yoshimoto, K. Nishio, M. Sho, M. Akiyama, T. Miyata, K. Okuchi, S. Nishimura, and M. Sugimoto. 2018. ‘Von Willebrand Factor Aggravates Hepatic Ischemia-Reperfusion Injury by Promoting Neutrophil Recruitment in Mice’, Thromb Haemost, 118: 700-08.
[0366] 44. Wan, H., Y. Wang, J. Ai, S. Brathwalte, H. NI, R. L. Macdonald, E. M. Hol, J. C. M. Meijers, and M. D. I. Vergouwen. 2018. ‘Role of von Willebrand factor and ADAMTS-13 in early brain injury after experimental subarachnoid hemorrhage’, J Thromb Haemost, 16:1413-22.
[0367] 45. Wang et al., Mol Neurobiol. 2015 December; 52(3): 1572-1579. Published online 2014 Nov. 4. doi: 10.1007/s12035-014-8952-x.
[0368] 46. Whiteley, W. N., J. Emberson, K. R. Lees, L. Blackwell, G. Albers, E. Bluhmki, T. Brott, G. Cohen, S. Davis, G. Donnan, J. Grotta, G. Howard, M. Kaste, M. Koga, R. von Kummer, M. G. Lansberg, R. I. Lindley, P. Lyden, J. M. Olivot, M. Parsons, D. Toni, K. Toyoda, N. Wahlgren, J. Wardlaw, G. J. Del Zoppo, P. Sandercock, W. Hacke, C. Baigent, and Collaboration Stroke Thrombolysis Trialists. 2016. ‘Risk of intracerebral haemorrhage with alteplase after acute ischaemic stroke: a secondary analysis of an individual patient data meta-analysis’, Lancet Neurol, 15: 925-33.
[0369] 47. Witsch, T., K. Martinod, N. Sorvillo, I. Portier, S. F. De Meyer, and D. D. Wagner. 2018. ‘Recombinant Human ADAMTS13 Treatment Improves Myocardial Remodeling and Functionality After Pressure Overload Injury in Mice’, J Am Heart Assoc, 7.
[0370] 48. Wolters, F. J., J. Boender, P. S. de Vries, M. A. Sonneveld, P. J. Koudstaal, M. P. de Maat, O. H. Franco, M. K. Ikram, F. W. Leebeek, and M. A. Ikram. 2018. ‘Von Willebrand factor and ADAMTS13 activity in relation to risk of dementia: a population-based study’, Sci Rep, 8: 5474.
[0371] 49. Yaghi, S., J. Z. Willey, B. Cucchiara, J. N. Goldstein, N. R. Gonzales, P. Khatri, L. J. Kim, S. A. Mayer, K. N. Sheth, L. H. Schwamm, Council American Heart Association Stroke, Cardiovascular Council on, Nursing Stroke, Cardiology Council on Clinical, Care Council on Quality of, and Research Outcomes. 2017. ‘Treatment and Outcome of Hemorrhagic Transformation After Intravenous Alteplase in Acute Ischemic Stroke: A Scientific Statement for Healthcare Professionals From the American Heart Association/American Stroke Association’, Stroke, 48: e343-e61.
[0372] 50. Yang, P., Y. Zhang, L. Zhang, Y. Zhang, K. M. Treurniet, W. Chen, Y. Peng, H. Han, J. Wang, S. Wang, C. Yin, S. Liu, P. Wang, Q. Fang, H. Shi, J. Yang, C. Wen, C. Li, C. Jiang, J. Sun, X. Yue, M. Lou, M. Zhang, H. Shu, D. Sun, H. Liang, T. Li, F. Guo, K. Ke, H. Yuan, G. Wang, W. Yang, H. Shi, T. Li, Z. Li, P. Xing, P. Zhang, Y. Zhou, H. Wang, Y. Xu, Q. Huang, T. Wu, R. Zhao, Q. Li, Y. Fang, L. Wang, J. Lu, Y. Li, J. Fu, X. Zhong, Y. Wang, L. Wang, M. Goyal, D. W. J. Dippel, B. Hong, B. Deng, Ybwem Roos, Cblm Majole, J. Liu, and Direct-Mt Investigators. 2020. ‘Endovascular Thrombectomy with or without Intravenous Alteplase in Acute Stroke’, N Engl J Mod, 382: 1981-93.
[0373] 51. Zhao, B. Q., A. K. Chauhan, M. Canault, I. S. Patten, J. J. Yang, M. Dockal, F. Scheiflinger, and D. D. Wagner. 2009. ‘von Willebrand factor-cleaving protease ADAMTS13 reduces ischemic brain injury in experimental stroke’, Blood, 114: 3329-34.
[0374] 52. Zhou, S., S. Jiang, J. Guo, N. Xu, Q. Wang, G. Zhang, L. Zhao, Q. Zhou, X. Fu, L. Li, A. Patzak, M. Hultstrom, and E. Y. Lai. 2019. ‘ADAMTS13 protects mice against renal ischemia-reperfusion injury by reducing Inflammation and improving endothelial function’, Am J Physiol Renal Physiol, 316: F134-F45.
[0375] 53. Zitomersky, N. L., M. Demers, K. Martinod, M. Gallant, S. M. Cifuni, A. Biswas, S. Snapper, and D. D. Wagner. 2017. ‘ADAMTS13 Deficiency Worsens Colitis and Exogenous ADAMTS13 Administration Decreases Colitis Severity in Mice’, TH Open, 1: e11-e23.

[0376] For standard molecular biology techniques, see Sambrook, J., Russel, D. W. Molecular Cloning, A Laboratory Manual. 3 ed. 2001, Cold Spring Harbor, New York: Cold Spring Harbor Laboratory Press

The application's sequence listing, which the Patent Office published only in electronic form, follows.

SEQUENCE LISTING (156 sequences)

SEQ ID NO: 1 - protein, 1427 aa, Homo sapiens
MHQRHPRARCPPLCVAGILACGFLLGCWGPSHFQQSCLQALEPQAVSSYLSPGAPLKGRPPSPGFQRQRQRQRRAAGGILHLELLVAVGPDVFQAHQEDTERYVLTNLNIGAELLRDPSLGAQFRVHLVKMVILTEPEGAPNITANLTSSLLSVCGWSQTINPEDDTDPGHADLVLYITRFDLELPDGNRQVRGVTQLGGACSPTWSCLITEDTGFDLGVTIAHEIGHSFGLEHDGAPGSGCGPSGHVMASDGAAPRAGLAWSPCSRRQLLSLLSAGRARCVWDPPRPQPGSAGHPPDAQPGLYYSANEQCRVAFGPKAVACTFAREHLDMCQALSCHTDPLDQSSCSRLLVPLLDGTECGVEKWCSKGRCRSLVELTPIAAVHGRWSSWGPRSPCSRSCGGGVVTRRRQCNNPRPAFGGRACVGADLQAEMCNTQACEKTQLEFMSQQCARTDGQPLRSSPGGASFYHWGAAVPHSQGDALCRHMCRAIGESFIMKRGDSFLDGTRCMPSGPREDGTLSLCVSGSCRTFGCDGRMDSQQVWDRCQVCGGDNSTCSPRKGSFTAGRAREYVTFLTVTPNLTSVYIANHRPLFTHLAVRIGGRYVVAGKMSISPNTTYPSLLEDGRVEYRVALTEDRLPRLEEIRIWGPLQEDADIQVYRRYGEEYGNLTRPDITFTYFQPKPRQAWVWAAVRGPCSVSCGAGLRWVNYSCLDQARKELVETVQCQGSQQPPAWPEACVLEPCPPYWAVGDFGPCSASCGGGLRERPVRCVEAQGSLLKTLPPARCRAGAQQPAVALETCNPQPCPARWEVSEPSSCTSAGGAGLALENETCVPGADGLEAPVTEGPGSVDEKLPAPEPCVGMSCPPGWGHLDATSAGEKAPSPWGSIRTGAQAAHVWTPAAGSCSVSCGRGLMELRFLCMDSALRVPVQEELCGLASKPGSRREVCQAVPCPARWQYKLAACSVSCGRGVVRRILYCARAHGEDDGEEILLDTQCQGLPRPEPQEACSLEPCPPRWKVMSLGPCSASCGLGTARRSVACVQLDQGQDVEVDEAACAALVRPEASVPCLIADCTYRWHVGTWMECSVSCGDGIQRRRDTCLGPQAQAPVPADFCQHLPKPVTVRGCWAGPCVGQGTPSLVPHEEAAAPGRTTATPAGASLEWSQARGLLFSPAPQPRRLLPGPQENSVQSSACGRQHLEPTGTIDMRGPGQADCAVAIGRPLGEVVTLRVLESSLNCSAGDMLLLWGRLTWRKMCRKLLDMTFSSKTNTLVVRQRCGRPGGGVLLRYGSQLAPETFYRECDMQLFGPWGEIVSPSLSPATSNAGGCRLFINVAPHARIAIHALATNMGAGTEGANASYILIRDTHSLRTTAFHGQQVLYWESESSQAEMEFSEGFLKAQASLRGQYWTLQSWVPEMQDPQSWKGKEGT

SEQ ID NO: 2 - protein, 1371 aa, Homo sapiens
MHQRHPRARCPPLCVAGILACGFLLGCWGPSHFQQSCLQALEPQAVSSYLSPGAPLKGRPPSPGFQRQRQRQRRAAGGILHLELLVAVGPDVFQAHQEDTERYVLTNLNIGAELLRDPSLGAQFRVHLVKMVILTEPEGAPNITANLTSSLLSVCGWSQTINPEDDTDPGHADLVLYITRFDLELPDGNRQVRGVTQLGGACSPTWSCLITEDTGFDLGVTIAHEIGHSFGLEHDGAPGSGCGPSGHVMASDGAAPRAGLAWSPCSRRQLLSLLSAGRARCVWDPPRPQPGSAGHPPDAQPGLYYSANEQCRVAFGPKAVACTFAREHLDMCQALSCHTDPLDQSSCSRLLVPLLDGTECGVEKWCSKGRCRSLVELTPIAAVHGRWSSWGPRSPCSRSCGGGVVTRRRQCNNPRPAFGGRACVGADLQAEMCNTQACEKTQLEFMSQQCARTDGQPLRSSPGGASFYHWGAAVPHSQGDALCRHMCRAIGESFIMKRGDSFLDGTRCMPSGPREDGTLSLCVSGSCRTFGCDGRMDSQQVWDRCQVCGGDNSTCSPRKGSFTAGRAREYVTFLTVTPNLTSVYIANHRPLFTHLAVRIGGRYVVAGKMSISPNTTYPSLLEDGRVEYRVALTEDRLPRLEEIRIWGPLQEDADIQVYRRYGEEYGNLTRPDITFTYFQPKPRQAWVWAAVRGPCSVSCGAGLRWVNYSCLDQARKELVETVQCQGSQQPPAWPEACVLEPCPPYWAVGDFGPCSASCGGGLRERPVRCVEAQGSLLKTLPPARCRAGAQQPAVALETCNPQPCPARWEVSEPSSCTSAGGAGLALENETCVPGADGLEAPVTEGPGSVDEKLPAPEPCVGMSCPPGWGHLDATSAGEKAPSPWGSIRTGAQAAHVWTPAAGSCSVSCGRGLMELRFLCMDSALRVPVQEELCGLASKPGSRREVCQAVPCPARWQYKLAACSVSCGRGVVRRILYCARAHGEDDGEEILLDTQCQGLPRPEPQEACSLEPCPPRWKVMSLGPCSASCGLGTARRSVACVQLDQGQDVEVDEAACAALVRPEASVPCLIADCTYRWHVGTWMECSVSCGDGIQRRRDTCLGPQAQAPVPADFCQHLPKPVTVRGCWAGPCVGQGACGRQHLEPTGTIDMRGPGQADCAVAIGRPLGEVVTLRVLESSLNCSAGDMLLLWGRLTWRKMCRKLLDMTFSSKTNTLVVRQRCGRPGGGVLLRYGSQLAPETFYRECDMQLFGPWGEIVSPSLSPATSNAGGCRLFINVAPHARIAIHALATNMGAGTEGANASYILIRDTHSLRTTAFHGQQVLYWESESSQAEMEFSEGFLKAQASLRGQYWTLQSWVPEMQDPQSWKGKEGT

SEQ ID NO: 3 - protein, 1340 aa, Homo sapiens
MHQRHPRARCPPLCVAGILACGFLLGCWGPSHFQQSCLQALEPQAVSSYLSPGAPLKGRPPSPGFQRQRQRQRRAAGGILHLELLVAVGPDVFQAHQEDTERYVLTNLNIGAELLRDPSLGAQFRVHLVKMVILTEPEGAPNITANLTSSLLSVCGWSQTINPEDDTDPGHADLVLYITRFDLELPDGNRQVRGVTQLGGACSPTWSCLITEDTGFDLGVTIAHEIGHSFGLEHDGAPGSGCGPSGHVMASDGAAPRAGLAWSPCSRRQLLSLLSANEQCRVAFGPKAVACTFAREHLDMCQALSCHTDPLDQSSCSRLLVPLLDGTECGVEKWCSKGRCRSLVELTPIAAVHGRWSSWGPRSPCSRSCGGGVVTRRRQCNNPRPAFGGRACVGADLQAEMCNTQACEKTQLEFMSQQCARTDGQPLRSSPGGASFYHWGAAVPHSQGDALCRHMCRAIGESFIMKRGDSFLDGTRCMPSGPREDGTLSLCVSGSCRTFGCDGRMDSQQVWDRCQVCGGDNSTCSPRKGSFTAGRAREYVTFLTVTPNLTSVYIANHRPLFTHLAVRIGGRYVVAGKMSISPNTTYPSLLEDGRVEYRVALTEDRLPRLEEIRIWGPLQEDADIQVYRRYGEEYGNLTRPDITFTYFQPKPRQAWVWAAVRGPCSVSCGAGLRWVNYSCLDQARKELVETVQCQGSQQPPAWPEACVLEPCPPYWAVGDFGPCSASCGGGLRERPVRCVEAQGSLLKTLPPARCRAGAQQPAVALETCNPQPCPARWEVSEPSSCTSAGGAGLALENETCVPGADGLEAPVTEGPGSVDEKLPAPEPCVGMSCPPGWGHLDATSAGEKAPSPWGSIRTGAQAAHVWTPAAGSCSVSCGRGLMELRFLCMDSALRVPVQEELCGLASKPGSRREVCQAVPCPARWQYKLAACSVSCGRGVVRRILYCARAHGEDDGEEILLDTQCQGLPRPEPQEACSLEPCPPRWKVMSLGPCSASCGLGTARRSVACVQLDQGQDVEVDEAACAALVRPEASVPCLIADCTYRWHVGTWMECSVSCGDGIQRRRDTCLGPQAQAPVPADFCQHLPKPVTVRGCWAGPCVGQGACGRQHLEPTGTIDMRGPGQADCAVAIGRPLGEVVTLRVLESSLNCSAGDMLLLWGRLTWRKMCRKLLDMTFSSKTNTLVVRQRCGRPGGGVLLRYGSQLAPETFYRECDMQLFGPWGEIVSPSLSPATSNAGGCRLFINVAPHARIAIHALATNMGAGTEGANASYILIRDTHSLRTTAFHGQQVLYWESESSQAEMEFSEGFLKAQASLRGQYWTLQSWVPEMQDPQSWKGKEGT

SEQ ID NO: 4 - protein, 364 aa, Homo sapiens
MDMCQALSCHTDPLDQSSCSRLLVPLLDGTECGVEKWCSKGRCRSLVELTPIAAVHGRWSSWGPRSPCSRSCGGGVVTRRRQCNNPRPAFGGRACVGADLQAEMCNTQACEKTQLEFMSQQCARTDGQPLRSSPGGASFYHWGAAVPHSQGDALCRHMCRAIGESFIMKRGDSFLDGTRCMPSGPREDGTLSLCVSGSCRTFGCDGRMDSQQVWDRCQVCGGDNSTCSPRKGSFTAGRAREYVTFLTVTPNLTSVYIANHRPLFTHLAVRIGGRYVVAGKMSISPNTTYPSLLEDGRVEYRVALTEDRLPRLEEIRIWGPLQEDADIQVGGVRAQLMHISWWSRPGLGERDLCARGRWPGGSSD

SEQ ID NO: 5 - protein, 29 aa, Homo sapiens
MHQRHPRARCPPLCVAGILACGFLLGCWG

SEQ ID NO: 6 - protein, 45 aa, Homo sapiens
PSHFQQSCLQALEPQAVSSYLSPGAPLKGRPPSPGFQRQRQRQRR

SEQ ID NO: 7 - protein, 1398 aa, Homo sapiens
PSHFQQSCLQALEPQAVSSYLSPGAPLKGRPPSPGFQRQRQRQRRAAGGILHLELLVAVGPDVFQAHQEDTERYVLTNLNIGAELLRDPSLGAQFRVHLVKMVILTEPEGAPNITANLTSSLLSVCGWSQTINPEDDTDPGHADLVLYITRFDLELPDGNRQVRGVTQLGGACSPTWSCLITEDTGFDLGVTIAHEIGHSFGLEHDGAPGSGCGPSGHVMASDGAAPRAGLAWSPCSRRQLLSLLSAGRARCVWDPPRPQPGSAGHPPDAQPGLYYSANEQCRVAFGPKAVACTFAREHLDMCQALSCHTDPLDQSSCSRLLVPLLDGTECGVEKWCSKGRCRSLVELTPIAAVHGRWSSWGPRSPCSRSCGGGVVTRRRQCNNPRPAFGGRACVGADLQAEMCNTQACEKTQLEFMSQQCARTDGQPLRSSPGGASFYHWGAAVPHSQGDALCRHMCRAIGESFIMKRGDSFLDGTRCMPSGPREDGTLSLCVSGSCRTFGCDGRMDSQQVWDRCQVCGGDNSTCSPRKGSFTAGRAREYVTFLTVTPNLTSVYIANHRPLFTHLAVRIGGRYVVAGKMSISPNTTYPSLLEDGRVEYRVALTEDRLPRLEEIRIWGPLQEDADIQVYRRYGEEYGNLTRPDITFTYFQPKPRQAWVWAAVRGPCSVSCGAGLRWVNYSCLDQARKELVETVQCQGSQQPPAWPEACVLEPCPPYWAVGDFGPCSASCGGGLRERPVRCVEAQGSLLKTLPPARCRAGAQQPAVALETCNPQPCPARWEVSEPSSCTSAGGAGLALENETCVPGADGLEAPVTEGPGSVDEKLPAPEPCVGMSCPPGWGHLDATSAGEKAPSPWGSIRTGAQAAHVWTPAAGSCSVSCGRGLMELRFLCMDSALRVPVQEELCGLASKPGSRREVCQAVPCPARWQYKLAACSVSCGRGVVRRILYCARAHGEDDGEEILLDTQCQGLPRPEPQEACSLEPCPPRWKVMSLGPCSASCGLGTARRSVACVQLDQGQDVEVDEAACAALVRPEASVPCLIADCTYRWHVGTWMECSVSCGDGIQRRRDTCLGPQAQAPVPADFCQHLPKPVTVRGCWAGPCVGQGTPSLVPHEEAAAPGRTTATPAGASLEWSQARGLLFSPAPQPRRLLPGPQENSVQSSACGRQHLEPTGTIDMRGPGQADCAVAIGRPLGEVVTLRVLESSLNCSAGDMLLLWGRLTWRKMCRKLLDMTFSSKTNTLVVRQRCGRPGGGVLLRYGSQLAPETFYRECDMQLFGPWGEIVSPSLSPATSNAGGCRLFINVAPHARIAIHALATNMGAGTEGANASYILIRDTHSLRTTAFHGQQVLYWESESSQAEMEFSEGFLKAQASLRGQYWTLQSWVPEMQDPQSWKGKEGT

SEQ ID NO: 8 - protein, 1353 aa, Homo sapiens
AAGGILHLELLVAVGPDVFQAHQEDTERYVLTNLNIGAELLRDPSLGAQFRVHLVKMVILTEPEGAPNITANLTSSLLSVCGWSQTINPEDDTDPGHADLVLYITRFDLELPDGNRQVRGVTQLGGACSPTWSCLITEDTGFDLGVTIAHEIGHSFGLEHDGAPGSGCGPSGHVMASDGAAPRAGLAWSPCSRRQLLSLLSAGRARCVWDPPRPQPGSAGHPPDAQPGLYYSANEQCRVAFGPKAVACTFAREHLDMCQALSCHTDPLDQSSCSRLLVPLLDGTECGVEKWCSKGRCRSLVELTPIAAVHGRWSSWGPRSPCSRSCGGGVVTRRRQCNNPRPAFGGRACVGADLQAEMCNTQACEKTQLEFMSQQCARTDGQPLRSSPGGASFYHWGAAVPHSQGDALCRHMCRAIGESFIMKRGDSFLDGTRCMPSGPREDGTLSLCVSGSCRTFGCDGRMDSQQVWDRCQVCGGDNSTCSPRKGSFTAGRAREYVTFLTVTPNLTSVYIANHRPLFTHLAVRIGGRYVVAGKMSISPNTTYPSLLEDGRVEYRVALTEDRLPRLEEIRIWGPLQEDADIQVYRRYGEEYGNLTRPDITFTYFQPKPRQAWVWAAVRGPCSVSCGAGLRWVNYSCLDQARKELVETVQCQGSQQPPAWPEACVLEPCPPYWAVGDFGPCSASCGGGLRERPVRCVEAQGSLLKTLPPARCRAGAQQPAVALETCNPQPCPARWEVSEPSSCTSAGGAGLALENETCVPGADGLEAPVTEGPGSVDEKLPAPEPCVGMSCPPGWGHLDATSAGEKAPSPWGSIRTGAQAAHVWTPAAGSCSVSCGRGLMELRFLCMDSALRVPVQEELCGLASKPGSRREVCQAVPCPARWQYKLAACSVSCGRGVVRRILYCARAHGEDDGEEILLDTQCQGLPRPEPQEACSLEPCPPRWKVMSLGPCSASCGLGTARRSVACVQLDQGQDVEVDEAACAALVRPEASVPCLIADCTYRWHVGTWMECSVSCGDGIQRRRDTCLGPQAQAPVPADFCQHLPKPVTVRGCWAGPCVGQGTPSLVPHEEAAAPGRTTATPAGASLEWSQARGLLFSPAPQPRRLLPGPQENSVQSSACGRQHLEPTGTIDMRGPGQADCAVAIGRPLGEVVTLRVLESSLNCSAGDMLLLWGRLTWRKMCRKLLDMTFSSKTNTLVVRQRCGRPGGGVLLRYGSQLAPETFYRECDMQLFGPWGEIVSPSLSPATSNAGGCRLFINVAPHARIAIHALATNMGAGTEGANASYILIRDTHSLRTTAFHGQQVLYWESESSQAEMEFSEGFLKAQASLRGQYWTLQSWVPEMQDPQSWKGKEGT

SEQ ID NO: 9 - protein, 1342 aa, Homo sapiens
PSHFQQSCLQALEPQAVSSYLSPGAPLKGRPPSPGFQRQRQRQRRAAGGILHLELLVAVGPDVFQAHQEDTERYVLTNLNIGAELLRDPSLGAQFRVHLVKMVILTEPEGAPNITANLTSSLLSVCGWSQTINPEDDTDPGHADLVLYITRFDLELPDGNRQVRGVTQLGGACSPTWSCLITEDTGFDLGVTIAHEIGHSFGLEHDGAPGSGCGPSGHVMASDGAAPRAGLAWSPCSRRQLLSLLSAGRARCVWDPPRPQPGSAGHPPDAQPGLYYSANEQCRVAFGPKAVACTFAREHLDMCQALSCHTDPLDQSSCSRLLVPLLDGTECGVEKWCSKGRCRSLVELTPIAAVHGRWSSWGPRSPCSRSCGGGVVTRRRQCNNPRPAFGGRACVGADLQAEMCNTQACEKTQLEFMSQQCARTDGQPLRSSPGGASFYHWGAAVPHSQGDALCRHMCRAIGESFIMKRGDSFLDGTRCMPSGPREDGTLSLCVSGSCRTFGCDGRMDSQQVWDRCQVCGGDNSTCSPRKGSFTAGRAREYVTFLTVTPNLTSVYIANHRPLFTHLAVRIGGRYVVAGKMSISPNTTYPSLLEDGRVEYRVALTEDRLPRLEEIRIWGPLQEDADIQVYRRYGEEYGNLTRPDITFTYFQPKPRQAWVWAAVRGPCSVSCGAGLRWVNYSCLDQARKELVETVQCQGSQQPPAWPEACVLEPCPPYWAVGDFGPCSASCGGGLRERPVRCVEAQGSLLKTLPPARCRAGAQQPAVALETCNPQPCPARWEVSEPSSCTSAGGAGLALENETCVPGADGLEAPVTEGPGSVDEKLPAPEPCVGMSCPPGWGHLDATSAGEKAPSPWGSIRTGAQAAHVWTPAAGSCSVSCGRGLMELRFLCMDSALRVPVQEELCGLASKPGSRREVCQAVPCPARWQYKLAACSVSCGRGVVRRILYCARAHGEDDGEEILLDTQCQGLPRPEPQEACSLEPCPPRWKVMSLGPCSASCGLGTARRSVACVQLDQGQDVEVDEAACAALVRPEASVPCLIADCTYRWHVGTWMECSVSCGDGIQRRRDTCLGPQAQAPVPADFCQHLPKPVTVRGCWAGPCVGQGACGRQHLEPTGTIDMRGPGQADCAVAIGRPLGEVVTLRVLESSLNCSAGDMLLLWGRLTWRKMCRKLLDMTFSSKTNTLVVRQRCGRPGGGVLLRYGSQLAPETFYRECDMQLFGPWGEIVSPSLSPATSNAGGCRLFINVAPHARIAIHALATNMGAGTEGANASYILIRDTHSLRTTAFHGQQVLYWESESSQAEMEFSEGFLKAQASLRGQYWTLQSWVPEMQDPQSWKGKEGT

SEQ ID NO: 10 - protein, 1297 aa, Homo sapiens
AAGGILHLELLVAVGPDVFQAHQEDTERYVLTNLNIGAELLRDPSLGAQFRVHLVKMVILTEPEGAPNITANLTSSLLSVCGWSQTINPEDDTDPGHADLVLYITRFDLELPDGNRQVRGVTQLGGACSPTWSCLITEDTGFDLGVTIAHEIGHSFGLEHDGAPGSGCGPSGHVMASDGAAPRAGLAWSPCSRRQLLSLLSAGRARCVWDPPRPQPGSAGHPPDAQPGLYYSANEQCRVAFGPKAVACTFAREHLDMCQALSCHTDPLDQSSCSRLLVPLLDGTECGVEKWCSKGRCRSLVELTPIAAVHGRWSSWGPRSPCSRSCGGGVVTRRRQCNNPRPAFGGRACVGADLQAEMCNTQACEKTQLEFMSQQCARTDGQPLRSSPGGASFYHWGAAVPHSQGDALCRHMCRAIGESFIMKRGDSFLDGTRCMPSGPREDGTLSLCVSGSCRTFGCDGRMDSQQVWDRCQVCGGDNSTCSPRKGSFTAGRAREYVTFLTVTPNLTSVYIANHRPLFTHLAVRIGGRYVVAGKMSISPNTTYPSLLEDGRVEYRVALTEDRLPRLEEIRIWGPLQEDADIQVYRRYGEEYGNLTRPDITFTYFQPKPRQAWVWAAVRGPCSVSCGAGLRWVNYSCLDQARKELVETVQCQGSQQPPAWPEACVLEPCPPYWAVGDFGPCSASCGGGLRERPVRCVEAQGSLLKTLPPARCRAGAQQPAVALETCNPQPCPARWEVSEPSSCTSAGGAGLALENETCVPGADGLEAPVTEGPGSVDEKLPAPEPCVGMSCPPGWGHLDATSAGEKAPSPWGSIRTGAQAAHVWTPAAGSCSVSCGRGLMELRFLCMDSALRVPVQEELCGLASKPGSRREVCQAVPCPARWQYKLAACSVSCGRGVVRRILYCARAHGEDDGEEILLDTQCQGLPRPEPQEACSLEPCPPRWKVMSLGPCSASCGLGTARRSVACVQLDQGQDVEVDEAACAALVRPEASVPCLIADCTYRWHVGTWMECSVSCGDGIQRRRDTCLGPQAQAPVPADFCQHLPKPVTVRGCWAGPCVGQGACGRQHLEPTGTIDMRGPGQADCAVAIGRPLGEVVTLRVLESSLNCSAGDMLLLWGRLTWRKMCRKLLDMTFSSKTNTLVVRQRCGRPGGGVLLRYGSQLAPETFYRECDMQLFGPWGEIVSPSLSPATSNAGGCRLFINVAPHARIAIHALATNMGAGTEGANASYILIRDTHSLRTTAFHGQQVLYWESESSQAEMEFSEGFLKAQASLRGQYWTLQSWVPEMQDPQSWKGKEGT

SEQ ID NO: 11 - protein, 1311 aa, Homo sapiens
PSHFQQSCLQALEPQAVSSYLSPGAPLKGRPPSPGFQRQRQRQRRAAGGILHLELLVAVGPDVFQAHQEDTERYVLTNLNIGAELLRDPSLGAQFRVHLVKMVILTEPEGAPNITANLTSSLLSVCGWSQTINPEDDTDPGHADLVLYITRFDLELPDGNRQVRGVTQLGGACSPTWSCLITEDTGFDLGVTIAHEIGHSFGLEHDGAPGSGCGPSGHVMASDGAAPRAGLAWSPCSRRQLLSLLSANEQCRVAFGPKAVACTFAREHLDMCQALSCHTDPLDQSSCSRLLVPLLDGTECGVEKWCSKGRCRSLVELTPIAAVHGRWSSWGPRSPCSRSCGGGVVTRRRQCNNPRPAFGGRACVGADLQAEMCNTQACEKTQLEFMSQQCARTDGQPLRSSPGGASFYHWGAAVPHSQGDALCRHMCRAIGESFIMKRGDSFLDGTRCMPSGPREDGTLSLCVSGSCRTFGCDGRMDSQQVWDRCQVCGGDNSTCSPRKGSFTAGRAREYVTFLTVTPNLTSVYIANHRPLFTHLAVRIGGRYVVAGKMSISPNTTYPSLLEDGRVEYRVALTEDRLPRLEEIRIWGPLQEDADIQVYRRYGEEYGNLTRPDITFTYFQPKPRQAWVWAAVRGPCSVSCGAGLRWVNYSCLDQARKELVETVQCQGSQQPPAWPEACVLEPCPPYWAVGDFGPCSASCGGGLRERPVRCVEAQGSLLKTLPPARCRAGAQQPAVALETCNPQPCPARWEVSEPSSCTSAGGAGLALENETCVPGADGLEAPVTEGPGSVDEKLPAPEPCVGMSCPPGWGHLDATSAGEKAPSPWGSIRTGAQAAHVWTPAAGSCSVSCGRGLMELRFLCMDSALRVPVQEELCGLASKPGSRREVCQAVPCPARWQYKLAACSVSCGRGVVRRILYCARAHGEDDGEEILLDTQCQGLPRPEPQEACSLEPCPPRWKVMSLGPCSASCGLGTARRSVACVQLDQGQDVEVDEAACAALVRPEASVPCLIADCTYRWHVGTWMECSVSCGDGIQRRRDTCLGPQAQAPVPADFCQHLPKPVTVRGCWAGPCVGQGACGRQHLEPTGTIDMRGPGQADCAVAIGRPLGEVVTLRVLESSLNCSAGDMLLLWGRLTWRKMCRKLLDMTFSSKTNTLVVRQRCGRPGGGVLLRYGSQLAPETFYRECDMQLFGPWGEIVSPSLSPATSNAGGCRLFINVAPHARIAIHALATNMGAGTEGANASYILIRDTHSLRTTAFHGQQVLYWESESSQAEMEFSEGFLKAQASLRGQYWTLQSWVPEMQDPQSWKGKEGT

SEQ ID NO: 12 - protein, 1266 aa, Homo sapiens
AAGGILHLELLVAVGPDVFQAHQEDTERYVLTNLNIGAELLRDPSLGAQFRVHLVKMVILTEPEGAPNITANLTSSLLSVCGWSQTINPEDDTDPGHADLVLYITRFDLELPDGNRQVRGVTQLGGACSPTWSCLITEDTGFDLGVTIAHEIGHSFGLEHDGAPGSGCGPSGHVMASDGAAPRAGLAWSPCSRRQLLSLLSANEQCRVAFGPKAVACTFAREHLDMCQALSCHTDPLDQSSCSRLLVPLLDGTECGVEKWCSKGRCRSLVELTPIAAVHGRWSSWGPRSPCSRSCGGGVVTRRRQCNNPRPAFGGRACVGADLQAEMCNTQACEKTQLEFMSQQCARTDGQPLRSSPGGASFYHWGAAVPHSQGDALCRHMCRAIGESFIMKRGDSFLDGTRCMPSGPREDGTLSLCVSGSCRTFGCDGRMDSQQVWDRCQVCGGDNSTCSPRKGSFTAGRAREYVTFLTVTPNLTSVYIANHRPLFTHLAVRIGGRYVVAGKMSISPNTTYPSLLEDGRVEYRVALTEDRLPRLEEIRIWGPLQEDADIQVYRRYGEEYGNLTRPDITFTYFQPKPRQAWVWAAVRGPCSVSCGAGLRWVNYSCLDQARKELVETVQCQGSQQPPAWPEACVLEPCPPYWAVGDFGPCSASCGGGLRERPVRCVEAQGSLLKTLPPARCRAGAQQPAVALETCNPQPCPARWEVSEPSSCTSAGGAGLALENETCVPGADGLEAPVTEGPGSVDEKLPAPEPCVGMSCPPGWGHLDATSAGEKAPSPWGSIRTGAQAAHVWTPAAGSCSVSCGRGLMELRFLCMDSALRVPVQEELCGLASKPGSRREVCQAVPCPARWQYKLAACSVSCGRGVVRRILYCARAHGEDDGEEILLDTQCQGLPRPEPQEACSLEPCPPRWKVMSLGPCSASCGLGTARRSVACVQLDQGQDVEVDEAACAALVRPEASVPCLIADCTYRWHVGTWMECSVSCGDGIQRRRDTCLGPQAQAPVPADFCQHLPKPVTVRGCWAGPCVGQGACGRQHLEPTGTIDMRGPGQADCAVAIGRPLGEVVTLRVLESSLNCSAGDMLLLWGRLTWRKMCRKLLDMTFSSKTNTLVVRQRCGRPGGGVLLRYGSQLAPETFYRECDMQLFGPWGEIVSPSLSPATSNAGGCRLFINVAPHARIAIHALATNMGAGTEGANASYILIRDTHSLRTTAFHGQQVLYWESESSQAEMEFSEGFLKAQASLRGQYWTLQSWVPEMQDPQSWKGKEGT

SEQ ID NO: 13 - protein, 207 aa, Homo sapiens
LHLELLVAVGPDVFQAHQEDTERYVLTNLNIGAELLRDPSLGAQFRVHLVKMVILTEPEGAPNITANLTSSLLSVCGWSQTINPEDDTDPGHADLVLYITRFDLELPDGNRQVRGVTQLGGACSPTWSCLITEDTGFDLGVTIAHEIGHSFGLEHDGAPGSGCGPSGHVMASDGAAPRAGLAWSPCSRRQLLSLLSAGRARCVWDPP

SEQ ID NO: 14 - protein, 97 aa, Homo sapiens
RPQPGSAGHPPDAQPGLYYSANEQCRVAFGPKAVACTFAREHLDMCQALSCHTDPLDQSSCSRLLVPLLDGTECGVEKWCSKGRCRSLVELTPIAAV

SEQ ID NO: 15 - protein, 56 aa, Homo sapiens
HGRWSSWGPRSPCSRSCGGGVVTRRRQCNNPRPAFGGRACVGADLQAEMCNTQACE

SEQ ID NO: 16 - protein, 117 aa, Homo sapiens
KTQLEFMSQQCARTDGQPLRSSPGGASFYHWGAAVPHSQGDALCRHMCRAIGESFIMKRGDSFLDGTRCMPSGPREDGTLSLCVSGSCRTFGCDGRMDSQQVWDRCQVCGGDNSTCS

SEQ ID NO: 17 - protein, 130 aa, Homo sapiens
SPRKGSFTAGRAREYVTFLTVTPNLTSVYIANHRPLFTHLAVRIGGRYVVAGKMSISPNTTYPSLLEDGRVEYRVALTEDRLPRLEEIRIWGPLQEDADIQVYRRYGEEYGNLTRPDITFTYFQPKPRQA

SEQ ID NO: 18 - protein, 49 aa, Homo sapiens
PRQAWVWAAVRGPCSVSCGAGLRWVNYSCLDQARKELVETVQCQGSQQP

SEQ ID NO: 19 - protein, 64 aa, Homo sapiens
CPPYWAVGDFGPCSASCGGGLRERPVRCVEAQGSLLKTLPPARCRAGAQQPAVALETCNPQPCP

SEQ ID NO: 20 - protein, 52 aa, Homo sapiens
WEVSEPSSCTSAGGAGLALENETCVPGADGLEAPVTEGPGSVDEKLPAPEPC

SEQ ID NO: 21 - protein, 55 aa, Homo sapiens
VWTPAAGSCSVSCGRGLMELRFLCMDSALRVPVQEELCGLASKPGSRREVCQAVP

SEQ ID NO: 22 - protein, 61 aa, Homo sapiens
CPARWQYKLAACSVSCGRGVVRRILYCARAHGEDDGEEILLDTQCQGLPRPEPQEACSLEP

SEQ ID NO: 23 - protein, 57 aa, Homo sapiens
CPPRWKVMSLGPCSASCGLGTARRSVACVQLDQGQDVEVDEAACAALVRPEASVPCL

SEQ ID NO: 24 - protein, 60 aa, Homo sapiens
CTYRWHVGTWMECSVSCGDGIQRRRDTCLGPQAQAPVPADFCQHLPKPVTVRGCWAGPCV

SEQ ID NO: 25 - protein, 107 aa, Homo sapiens
CGRQHLEPTGTIDMRGPGQADCAVAIGRPLGEVVTLRVLESSLNCSAGDMLLLWGRLTWRKMCRKLLDMTFSSKTNTLVVRQRCGRPGGGVLLRYGSQLAPETFYRE

SEQ ID NO: 26 - protein, 129 aa, Homo sapiens
CDMQLFGPWGEIVSPSLSPATSNAGGCRLFINVAPHARIAIHALATNMGAGTEGANASYILIRDTHSLRTTAFHGQQVLYWESESSQAEMEFSEGFLKAQASLRGQYWTLQSWVPEMQDPQSWKGKEGT

SEQ ID NO: 27 - protein, 2813 aa, Homo sapiens
MIPARFAGVLLALALILPGTLCAEGTRGRSSTARCSLFGSDFVNTFDGSMYSFAGYCSYLLAGGCQKRSFSIIGDFQNGKRVSLSVYLGEFFDIHLFVNGTVTQGDQRVSMPYASKGLYLETEAGYYKLSGEAYGFVARIDGSGNFQVLLSDRYFNKTCGLCGNFNIFAEDDFMTQEGTLTSDPYDFANSWALSSGEQWCERASPPSSSCNISSGEMQKGLWEQCQLLKSTSVFARCHPLVDPEPFVALCEKTLCECAGGLECACPALLEYARTCAQEGMVLYGWTDHSACSPVCPAGMEYRQCVSPCARTCQSLHINEMCQERCVDGCSCPEGQLLDEGLCVESTECPCVHSGKRYPPGTSLSRDCNTCICRNSQWICSNEECPGECLVTGQSHFKSFDNRYFTFSGICQYLLARDCQDHSFSIVIETVQCADDRDAVCTRSVTVRLPGLHNSLVKLKHGAGVAMDGQDVQLPLLKGDLRIQHTVTASVRLSYGEDLQMDWDGRGRLLVKLSPVYAGKTCGLCGNYNGNQGDDFLTPSGLAEPRVEDFGNAWKLHGDCQDLQKQHSDPCALNPRMTRFSEEACAVLTSPTFEACHRAVSPLPYLRNCRYDVCSCSDGRECLCGALASYAAACAGRGVRVAWREPGRCELNCPKGQVYLQCGTPCNLTCRSLSYPDEECNEACLEGCFCPPGLYMDERGDCVPKAQCPCYYDGEIFQPEDIFSDHHTMCYCEDGFMHCTMSGVPGSLLPDAVLSSPLSHRSKRSLSCRPPMVKLVCPADNLRAEGLECTKTCQNYDLECMSMGCVSGCLCPPGMVRHENRCVALERCPCFHQGKEYAPGETVKIGCNTCVCQDRKWNCTDHVCDATCSTIGMAHYLTFDGLKYLFPGECQYVLVQDYCGSNPGTFRILVGNKGCSHPSVKCKKRVTILVEGGEIELFDGEVNVKRPMKDETHFEVVESGRYIILLLGKALSVVWDRHLSISVVLKQTYQEKVCGLCGNFDGIQNNDLTSSNLQVEEDPVDFGNSWKVSSQCADTRKVPLDSSPATCHNNIMKQTMVDSSCRILTSDVFQDCNKLVDPEPYLDVCIYDTCSCESIGDCACFCDTIAAYAHVCAQHGKVVTWRTATLCPQSCEERNLRENGYECEWRYNSCAPACQVTCQHPEPLACPVQCVEGCHAHCPPGKILDELLQTCVDPEDCPVCEVAGRRFASGKKVTLNPSDPEHCQICHCDVVNLTCEACQEPGGLVVPPTDAPVSPTTLYVEDISEPPLHDFYCSRLLDLVFLLDGSSRLSEAEFEVLKAFVVDMMERLRISQKWVRVAVVEYHDGSHAYIGLKDRKRPSELRRIASQVKYAGSQVASTSEVLKYTLFQIFSKIDRPEASRITLLLMASQEPQRMSRNFVRYVQGLKKKKVIVIPVGIGPHANLKQIRLIEKQAPENKAFVLSSVDELEQQRDEIVSYLCDLAPEAPPPTLPPDMAQVTVGPGLLGVSTLGPKRNSMVLDVAFVLEGSDKIGEADFNRSKEFMEEVIQRMDVGQDSIHVTVLQYSYMVTVEYPFSEAQSKGDILQRVREIRYQGGNRTNTGLALRYLSDHSFLVSQGDREQAPNLVYMVTGNPASDEIKRLPGDIQVVPIGVGPNANVQELERIGWPNAPILIQDFETLPREAPDLVLQRCCSGEGLQIPTLSPAPDCSQPLDVILLLDGSSSFPASYFDEMKSFAKAFISKANIGPRLTQVSVLQYGSITTIDVPWNVVPEKAHLLSLVDVMQREGGPSQIGDALGFAVRYLTSEMHGARPGASKAVVILVTDVSVDSVDAAADAARSNRVTVFPIGIGDRYDAAQLRILAGPAGDSNVVKLQRIEDLPTMVTLGNSFLHKLCSGFVRICMDEDGNEKRPGDVWTLPDQCHTVTCQPDGQTLLKSHRVNCDRGLRPSCPNSQSPVKVEETCGCRWTCPCVCTGSSTRHIVTFDGQNFKLTGSCSYVLFQNKEQDLEVILHNGACSPGARQGCMKSIEVKHSALSVELHSDMEVTVNGRLVSVPYVGGNMEVNVYGAIMHEVRFNHLGHIFTFTPQNNEFQLQLSPKTFASKTYGLCGICDENGANDFMLRDGTVTTDWKTLVQEWTVQRPGQTCQPILEEQCLVPDSSHCQVLLLPLFAECHKVLAPATFYAICQQDSCHQEQVCEVIASYAHLCRTNGVCVDWRTPDFCAMSCPPSLVYNHCEHGCPRHCDGNVSSCGDHPSEGCFCPPDKVMLEGSCVPEEACTQCIGEDGVQHQFLEAWVPDHQPCQICTCLSGRKVNCTTQPCPTAKAPTCGLCEVARLRQNADQCCPEYECVCDPVSCDLPPVPHCERGLQPTLTNPGECRPNFTCACRKEECKRVSPPSCPPHRLPTLRKTQCCDEYECACNCVNSTVSCPLGYLASTATNDCGCTTTTCLPDKVCVHRSTIYPVGQFWEEGCDVCTCTDMEDAVMGLRVAQCSQKPCEDSCRSGFTYVLHEGECCGRCLPSACEVVTGSPRGDSQSSWKSVGSQWASPENPCLINECVRVKEEVFIQQRNVSCPQLEVPVCPSGFQLSCKTSACCPSCRCERMEACMLNGTVIGPGKTVMIDVCTTCRCMVQVGVISGFKLECRKTTCNPCPLGYKEENNTGECCGRCLPTACTIQLRGGQIMTLKRDETLQDGCDTHFCKVNERGEYFWEKRVTGCPPFDEHKCLAEGGKIMKIPGTCCDTCEEPECNDITARLQYVKVGSCKSEVEVDIHYCQGKCASKAMYSIDINDVQDQCSCCSPTRTEPMQVALHCTNGSVVYHEVLNAMECKCSPRKCSK

SEQ ID NO: 28 - protein, 351 aa, Homo sapiens
MGAQDEEEGIQDLDGLLVFDKIVEVTLLNLPWYNEETEGQRGEMTAPKSPRAKIRGTLCAEGTRGRSSTARCSLFGSDFVNTFDGSMYSFAGYCSYLLAGGCQKRSFSIIGDFQNGKRVSLSVYLGEFFDIHLFVNGTVTQGDQRVSMPYASKGLYLETEAGYYKLSGEAYGFVARIDGSGNFQVLLSDRYFNKTCGLCGNFNIFAEDDFMTQEGTLTSDPYDFANSWALSSGEQWCERASPPSSSCNISSGEMQKEEPECNDITARLQYVKVGSCKSEVEVDIHYCQGKCASKAMYSIDINDVQDQCSCCSPTRTEPMQVALHCTNGSVVYHEVLNAMECKCSPRKCSKI

SEQ ID NO: 29 - protein, 22 aa, Homo sapiens
MIPARFAGVLLALALILPGTLC

SEQ ID NO: 30 - protein, 2791 aa, Homo sapiens
AEGTRGRSSTARCSLFGSDFVNTFDGSMYSFAGYCSYLLAGGCQKRSFSIIGDFQNGKRVSLSVYLGEFFDIHLFVNGTVTQGDQRVSMPYASKGLYLETEAGYYKLSGEAYGFVARIDGSGNFQVLLSDRYFNKTCGLCGNFNIFAEDDFMTQEGTLTSDPYDFANSWALSSGEQWCERASPPSSSCNISSGEMQKGLWEQCQLLKSTSVFARCHPLVDPEPFVALCEKTLCECAGGLECACPALLEYARTCAQEGMVLYGWTDHSACSPVCPAGMEYRQCVSPCARTCQSLHINEMCQERCVDGCSCPEGQLLDEGLCVESTECPCVHSGKRYPPGTSLSRDCNTCICRNSQWICSNEECPGECLVTGQSHFKSFDNRYFTFSGICQYLLARDCQDHSFSIVIETVQCADDRDAVCTRSVTVRLPGLHNSLVKLKHGAGVAMDGQDVQLPLLKGDLRIQHTVTASVRLSYGEDLQMDWDGRGRLLVKLSPVYAGKTCGLCGNYNGNQGDDFLTPSGLAEPRVEDFGNAWKLHGDCQDLQKQHSDPCALNPRMTRFSEEACAVLTSPTFEACHRAVSPLPYLRNCRYDVCSCSDGRECLCGALASYAAACAGRGVRVAWREPGRCELNCPKGQVYLQCGTPCNLTCRSLSYPDEECNEACLEGCFCPPGLYMDERGDCVPKAQCPCYYDGEIFQPEDIFSDHHTMCYCEDGFMHCTMSGVPGSLLPDAVLSSPLSHRSKRSLSCRPPMVKLVCPADNLRAEGLECTKTCQNYDLECMSMGCVSGCLCPPGMVRHENRCVALERCPCFHQGKEYAPGETVKIGCNTCVCQDRKWNCTDHVCDATCSTIGMAHYLTFDGLKYLFPGECQYVLVQDYCGSNPGTFRILVGNKGCSHPSVKCKKRVTILVEGGEIELFDGEVNVKRPMKDETHFEVVESGRYIILLLGKALSVVWDRHLSISVVLKQTYQEKVCGLCGNFDGIQNNDLTSSNLQVEEDPVDFGNSWKVSSQCADTRKVPLDSSPATCHNNIMKQTMVDSSCRILTSDVFQDCNKLVDPEPYLDVCIYDTCSCESIGDCACFCDTIAAYAHVCAQHGKVVTWRTATLCPQSCEERNLRENGYECEWRYNSCAPACQVTCQHPEPLACPVQCVEGCHAHCPPGKILDELLQTCVDPEDCPVCEVAGRRFASGKKVTLNPSDPEHCQICHCDVVNLTCEACQEPGGLVVPPTDAPVSPTTLYVEDISEPPLHDFYCSRLLDLVFLLDGSSRLSEAEFEVLKAFVVDMMERLRISQKWVRVAVVEYHDGSHAYIGLKDRKRPSELRRIASQVKYAGSQVASTSEVLKYTLFQIFSKIDRPEASRITLLLMASQEPQRMSRNFVRYVQGLKKKKVIVIPVGIGPHANLKQIRLIEKQAPENKAFVLSSVDELEQQRDEIVSYLCDLAPEAPPPTLPPDMAQVTVGPGLLGVSTLGPKRNSMVLDVAFVLEGSDKIGEADFNRSKEFMEEVIQRMDVGQDSIHVTVLQYSYMVTVEYPFSEAQSKGDILQRVREIRYQGGNRTNTGLALRYLSDHSFLVSQGDREQAPNLVYMVTGNPASDEIKRLPGDIQVVPIGVGPNANVQELERIGWPNAPILIQDFETLPREAPDLVLQRCCSGEGLQIPTLSPAPDCSQPLDVILLLDGSSSFPASYFDEMKSFAKAFISKANIGPRLTQVSVLQYGSITTIDVPWNVVPEKAHLLSLVDVMQREGGPSQIGDALGFAVRYLTSEMHGARPGASKAVVILVTDVSVDSVDAAADAARSNRVTVFPIGIGDRYDAAQLRILAGPAGDSNVVKLQRIEDLPTMVTLGNSFLHKLCSGFVRICMDEDGNEKRPGDVWTLPDQCHTVTCQPDGQTLLKSHRVNCDRGLRPSCPNSQSPVKVEETCGCRWTCPCVCTGSSTRHIVTFDGQNFKLTGSCSYVLFQNKEQDLEVILHNGACSPGARQGCMKSIEVKHSALSVELHSDMEVTVNGRLVSVPYVGGNMEVNVYGAIMHEVRFNHLGHIFTFTPQNNEFQLQLSPKTFASKTYGLCGICDENGANDFMLRDGTVTTDWKTLVQEWTVQRPGQTCQPILEEQCLVPDSSHCQVLLLPLFAECHKVLAPATFYAICQQDSCHQEQVCEVIASYAHLCRTNGVCVDWRTPDFCAMSCPPSLVYNHCEHGCPRHCDGNVSSCGDHPSEGCFCPPDKVMLEGSCVPEEACTQCIGEDGVQHQFLEAWVPDHQPCQICTCLSGRKVNCTTQPCPTAKAPTCGLCEVARLRQNADQCCPEYECVCDPVSCDLPPVPHCERGLQPTLTNPGECRPNFTCACRKEECKRVSPPSCPPHRLPTLRKTQCCDEYECACNCVNSTVSCPLGYLASTATNDCGCTTTTCLPDKVCVHRSTIYPVGQFWEEGCDVCTCTDMEDAVMGLRVAQCSQKPCEDSCRSGFTYVLHEGECCGRCLPSACEVVTGSPRGDSQSSWKSVGSQWASPENPCLINECVRVKEEVFIQQRNVSCPQLEVPVCPSGFQLSCKTSACCPSCRCERMEACMLNGTVIGPGKTVMIDVCTTCRCMVQVGVISGFKLECRKTTCNPCPLGYKEENNTGECCGRCLPTACTIQLRGGQIMTLKRDETLQDGCDTHFCKVNERGEYFWEKRVTGCPPFDEHKCLAEGGKIMKIPGTCCDTCEEPECNDITARLQYVKVGSCKSEVEVDIHYCQGKCASKAMYSIDINDVQDQCSCCSPTRTEPMQVALHCTNGSVVYHEVLNAMECKCSPRKCSK

SEQ ID NO: 31 - protein, 741 aa, Homo sapiens
AEGTRGRSSTARCSLFGSDFVNTFDGSMYSFAGYCSYLLAGGCQKRSFSIIGDFQNGKRVSLSVYLGEFFDIHLFVNGTVTQGDQRVSMPYASKGLYLETEAGYYKLSGEAYGFVARIDGSGNFQVLLSDRYFNKTCGLCGNFNIFAEDDFMTQEGTLTSDPYDFANSWALSSGEQWCERASPPSSSCNISSGEMQKGLWEQCQLLKSTSVFARCHPLVDPEPFVALCEKTLCECAGGLECACPALLEYARTCAQEGMVLYGWTDHSACSPVCPAGMEYRQCVSPCARTCQSLHINEMCQERCVDGCSCPEGQLLDEGLCVESTECPCVHSGKRYPPGTSLSRDCNTCICRNSQWICSNEECPGECLVTGQSHFKSFDNRYFTFSGICQYLLARDCQDHSFSIVIETVQCADDRDAVCTRSVTVRLPGLHNSLVKLKHGAGVAMDGQDVQLPLLKGDLRIQHTVTASVRLSYGEDLQMDWDGRGRLLVKLSPVYAGKTCGLCGNYNGNQGDDFLTPSGLAEPRVEDFGNAWKLHGDCQDLQKQHSDPCALNPRMTRFSEEACAVLTSPTFEACHRAVSPLPYLRNCRYDVCSCSDGRECLCGALASYAAACAGRGVRVAWREPGRCELNCPKGQVYLQCGTPCNLTCRSLSYPDEECNEACLEGCFCPPGLYMDERGDCVPKAQCPCYYDGEIFQPEDIFSDHHTMCYCEDGFMHCTMSGVPGSLLPDAVLSSPLSHRSKR

SEQ ID NO: 32 - protein, 2050 aa, Homo sapiens
SLSCRPPMVKLVCPADNLRAEGLECTKTCQNYDLECMSMGCVSGCLCPPGMVRHENRCVALERCPCFHQGKEYAPGETVKIGCNTCVCQDRKWNCTDHVCDATCSTIGMAHYLTFDGLKYLFPGECQYVLVQDYCGSNPGTFRILVGNKGCSHPSVKCKKRVTILVEGGEIELFDGEVNVKRPMKDETHFEVVESGRYIILLLGKALSVVWDRHLSISVVLKQTYQEKVCGLCGNFDGIQNNDLTSSNLQVEEDPVDFGNSWKVSSQCADTRKVPLDSSPATCHNNIMKQTMVDSSCRILTSDVFQDCNKLVDPEPYLDVCIYDTCSCESIGDCACFCDTIAAYAHVCAQHGKVVTWRTATLCPQSCEERNLRENGYECEWRYNSCAPACQVTCQHPEPLACPVQCVEGCHAHCPPGKILDELLQTCVDPEDCPVCEVAGRRFASGKKVTLNPSDPEHCQICHCDVVNLTCEACQEPGGLVVPPTDAPVSPTTLYVEDISEPPLHDFYCSRLLDLVFLLDGSSRLSEAEFEVLKAFVVDMMERLRISQKWVRVAVVEYHDGSHAYIGLKDRKRPSELRRIASQVKYAGSQVASTSEVLKYTLFQIFSKIDRPEASRITLLLMASQEPQRMSRNFVRYVQGLKKKKVIVIPVGIGPHANLKQIRLIEKQAPENKAFVLSSVDELEQQRDEIVSYLCDLAPEAPPPTLPPDMAQVTVGPGLLGVSTLGPKRNSMVLDVAFVLEGSDKIGEADFNRSKEFMEEVIQRMDVGQDSIHVTVLQYSYMVTVEYPFSEAQSKGDILQRVREIRYQGGNRTNTGLALRYLSDHSFLVSQGDREQAPNLVYMVTGNPASDEIKRLPGDIQVVPIGVGPNANVQELERIGWPNAPILIQDFETLPREAPDLVLQRCCSGEGLQIPTLSPAPDCSQPLDVILLLDGSSSFPASYFDEMKSFAKAFISKANIGPRLTQVSVLQYGSITTIDVPWNVVPEKAHLLSLVDVMQREGGPSQIGDALGFAVRYLTSEMHGARPGASKAVVILVTDVSVDSVDAAADAARSNRVTVFPIGIGDRYDAAQLRILAGPAGDSNVVKLQRIEDLPTMVTLGNSFLHKLCSGFVRICMDEDGNEKRPGDVWTLPDQCHTVTCQPDGQTLLKSHRVNCDRGLRPSCPNSQSPVKVEETCGCRWTCPCVCTGSSTRHIVTFDGQNFKLTGSCSYVLFQNKEQDLEVILHNGACSPGARQGCMKSIEVKHSALSVELHSDMEVTVNGRLVSVPYVGGNMEVNVYGAIMHEVRFNHLGHIFTFTPQNNEFQLQLSPKTFASKTYGLCGICDENGANDFMLRDGTVTTDWKTLVQEWTVQRPGQTCQPILEEQCLVPDSSHCQVLLLPLFAECHKVLAPATFYAICQQDSCHQEQVCEVIASYAHLCRTNGVCVDWRTPDFCAMSCPPSLVYNHCEHGCPRHCDGNVSSCGDHPSEGCFCPPDKVMLEGSCVPEEACTQCIGEDGVQHQFLEAWVPDHQPCQICTCLSGRKVNCTTQPCPTAKAPTCGLCEVARLRQNADQCCPEYECVCDPVSCDLPPVPHCERGLQPTLTNPGECRPNFTCACRKEECKRVSPPSCPPHRLPTLRKTQCCDEYECACNCVNSTVSCPLGYLASTATNDCGCTTTTCLPDKVCVHRSTIYPVGQFWEEGCDVCTCTDMEDAVMGLRVAQCSQKPCEDSCRSGFTYVLHEGECCGRCLPSACEVVTGSPRGDSQSSWKSVGSQWASPENPCLINECVRVKEEVFIQQRNVSCPQLEVPVCPSGFQLSCKTSACCPSCRCERMEACMLNGTVIGPGKTVMIDVCTTCRCMVQVGVISGFKLECRKTTCNPCPLGYKEENNTGECCGRCLPTACTIQLRGGQIMTLKRDETLQDGCDTHFCKVNERGEYFWEKRVTGCPPFDEHKCLAEGGKIMKIPGTCCDTCEEPECNDITARLQYVKVGSCKSEVEVDIHYCQGKCASKAMYSIDINDVQDQCSCCSPTRTEPMQVALHCTNGSVVYHEVLNAMECKCSPRKCSK

SEQ ID NO: 33 - protein, 207 aa, Homo sapiens
RCSLFGSDFVNTFDGSMYSFAGYCSYLLAGGCQKRSFSIIGDFQNGKRVSLSVYLGEFFDIHLFVNGTVTQGDQRVSMPYASKGLYLETEAGYYKLSGEAYGFVARIDGSGNFQVLLSDRYFNKTCGLCGNFNIFAEDDFMTQEGTLTSDPYDFANSWALSSGEQWCERASPPSSSCNISSGEMQKGLWEQCQLLKSTSVFARCHPL

SEQ ID NO: 34 - protein, 54 aa, Homo sapiens
CPAGMEYRQCVSPCARTCQSLHINEMCQERCVDGCSCPEGQLLDEGLCVESTEC

SEQ ID NO: 35 - protein, 212 aa, Homo sapiens
ECLVTGQSHFKSFDNRYFTFSGICQYLLARDCQDHSFSIVIETVQCADDRDAVCTRSVTVRLPGLHNSLVKLKHGAGVAMDGQDVQLPLLKGDLRIQHTVTASVRLSYGEDLQMDWDGRGRLLVKLSPVYAGKTCGLCGNYNGNQGDDFLTPSGLAEPRVEDFGNAWKLHGDCQDLQKQHSDPCALNPRMTRFSEEACAVLTSPTFEACHRA

SEQ ID NO: 36 - protein, 56 aa, Homo sapiens
CPKGQVYLQCGTPCNLTCRSLSYPDEECNEACLEGCFCPPGLYMDERGDCVPKAQC

SEQ ID NO: 37 - protein, 52 aa, Homo sapiens
CPADNLRAEGLECTKTCQNYDLECMSMGCVSGCLCPPGMVRHENRCVALERC

SEQ ID NO: 38 - protein, 209 aa, Homo sapiens
TCSTIGMAHYLTFDGLKYLFPGECQYVLVQDYCGSNPGTFRILVGNKGCSHPSVKCKKRVTILVEGGEIELFDGEVNVKRPMKDETHFEVVESGRYIILLLGKALSVVWDRHLSISVVLKQTYQEKVCGLCGNFDGIQNNDLTSSNLQVEEDPVDFGNSWKVSSQCADTRKVPLDSSPATCHNNIMKQTMVDSSCRILTSDVFQDCNKL

SEQ ID NO: 39 - protein, 51 aa, Homo sapiens
YNSCAPACQVTCQHPEPLACPVQCVEGCHAHCPPGKILDELLQTCVDPEDC

SEQ ID NO: 40 - protein, 177 aa, Homo sapiens
DLVFLLDGSSRLSEAEFEVLKAFVVDMMERLRISQKWVRVAVVEYHDGSHAYIGLKDRKRPSELRRIASQVKYAGSQVASTSEVLKYTLFQIFSKIDRPEASRITLLLMASQEPQRMSRNFVRYVQGLKKKKVIVIPVGIGPHANLKQIRLIEKQAPENKAFVLSSVDELEQQRDEI

SEQ ID NO: 41 - protein, 168 aa, Homo sapiens
DVAFVLEGSDKIGEADFNRSKEFMEEVIQRMDVGQDSIHVTVLQYSYMVTVEYPFSEAQSKGDILQRVREIRYQGGNRTNTGLALRYLSDHSFLVSQGDREQAPNLVYMVTGNPASDEIKRLPGDIQVVPIGVGPNANVQELERIGWPNAPILIQDFETLPREAPDLV

SEQ ID NO: 42 - protein, 181 aa, Homo sapiens
DVILLLDGSSSFPASYFDEMKSFAKAFISKANIGPRLTQVSVLQYGSITTIDVPWNVVPEKAHLLSLVDVMQREGGPSQIGDALGFAVRYLTSEMHGARPGASKAVVILVTDVSVDSVDAAADAARSNRVTVFPIGIGDRYDAAQLRILAGPAGDSNVVKLQRIEDLPTMVTLGNSFLHKL

SEQ ID NO: 43 - protein, 205 aa, Homo sapiens
VCTGSSTRHIVTFDGQNFKLTGSCSYVLFQNKEQDLEVILHNGACSPGARQGCMKSIEVKHSALSVELHSDMEVTVNGRLVSVPYVGGNMEVNVYGAIMHEVRFNHLGHIFTFTPQNNEFQLQLSPKTFASKTYGLCGICDENGANDFMLRDGTVTTDWKTLVQEWTVQRPGQTCQPILEEQCLVPDSSHCQVLLLPLFAECHKV

SEQ ID NO: 44 - protein, 74 aa, Homo sapiens
TQCIGEDGVQHQFLEAWVPDHQPCQICTCLSGRKVNCTTQPCPTAKAPTCGLCEVARLRQNADQCCPEYECVCD

SEQ ID NO: 45 - protein, 67 aa, Homo sapiens
KVCVHRSTIYPVGQFWEEGCDVCTCTDMEDAVMGLRVAQCSQKPCEDSCRSGFTYVLHEGECCGRCL

SEQ ID NO: 46 - protein, 66 aa, Homo sapiens
EACMLNGTVIGPGKTVMIDVCTTCRCMVQVGVISGFKLECRKTTCNPCPLGYKEENNTGECCGRCL

SEQ ID NO: 47 - protein, 89 aa, Homo sapiens
CNDITARLQYVKVGSCKSEVEVDIHYCQGKCASKAMYSIDINDVQDQCSCCSPTRTEPMQVALHCTNGSVVYHEVLNAMECKCSPRKCS

SEQ ID NO: 48 - protein, 60 aa, Homo sapiens
VGQGTPSLVPHEEAAAPGRTTATPAGASLEWSQARGLLFSPAPQPRRLLPGPQENSVQSS

SEQ ID NO: 49 - protein, 39 aa, Homo sapiens
AAAPGRTTATPAGASLEWSQARGLLFSPAPQPRRLLPGP

SEQ ID NO: 50 - protein, 39 aa, Artificial Sequence
  Linker 3 subregion of Human ADAMTS13 protein concensus sequence
  SITE (1)..(1): Wherein Xaa = A, K, I, L, M or V
  SITE (2)..(2): Wherein Xaa = A, K, I, L, M or V
  SITE (3)..(3): Wherein Xaa = A, K, I, L, M or V
  SITE (4)..(4): Wherein Xaa = P, K, I, L, M or V
  SITE (11)..(11): Wherein Xaa = P, K, I, L, M or V
  SITE (28)..(28): Wherein Xaa = P, K, I, L, M or V
  SITE (30)..(30): Wherein Xaa = P, K, I, L, M or V
  VARIANT (32)..(32): Wherein Xaa = P, K, I, L, M or V
  SITE (37)..(37): Wherein Xaa = P, K, I, L, M or V
  SITE (39)..(39): Wherein Xaa = P, K, I, L, M or V
XXXXGRTTATXAGASLEWSQARGLLFSXAXQXRRLLXGX

SEQ ID NO: 51 - protein, 39 aa, Artificial Sequence
  Linker 3 subregion of Human ADAMTS13 protein with a single point mutation A1144V
VAAPGRTTATPAGASLEWSQARGLLFSPAPQPRRLLPGP

SEQ ID NO: 52 - protein, 39 aa, Artificial Sequence
  Linker 3 subregion of Human ADAMTS13 protein with a single point mutation A1145V
AVAPGRTTATPAGASLEWSQARGLLFSPAPQPRRLLPGP

SEQ ID NO: 53 - protein, 39 aa, Artificial Sequence
  Linker 3 subregion of Human ADAMTS13 protein with a single point mutation A1146V
AAVPGRTTATPAGASLEWSQARGLLFSPAPQPRRLLPGP

SEQ ID NO: 54 - protein, 39 aa, Artificial Sequence
  Linker 3 subregion of Human ADAMTS13 protein with a single point mutation P1147V
AAAVGRTTATPAGASLEWSQARGLLFSPAPQPRRLLPGP

SEQ ID NO: 55 - protein, 39 aa, Artificial Sequence
  Linker 3 subregion of Human ADAMTS13 protein with a single point mutation P1154V
AAAPGRTTATVAGASLEWSQARGLLFSPAPQPRRLLPGP

SEQ ID NO: 56 - protein, 39 aa, Artificial Sequence
  Linker 3 subregion of Human ADAMTS13 protein with a single point mutation P1171V
AAAPGRTTATPAGASLEWSQARGLLFSVAPQPRRLLPGP

SEQ ID NO: 57 - protein, 39 aa, Artificial Sequence
  Linker 3 subregion of Human ADAMTS13 protein with a single point mutation P1173V
AAAPGRTTATPAGASLEWSQARGLLFSPAVQPRRLLPGP

SEQ ID NO: 58 - protein, 39 aa, Artificial Sequence
  Linker 3 subregion of Human ADAMTS13 protein with a single point mutation P1175V
AAAPGRTTATPAGASLEWSQARGLLFSPAPQVRRLLPGP

SEQ ID NO: 59 - protein, 39 aa, Artificial Sequence
  Linker 3 subregion of Human ADAMTS13 protein with a single point mutation P1180V
AAAPGRTTATPAGASLEWSQARGLLFSPAPQPRRLLVGP

SEQ ID NO: 60 - protein, 39 aa, Artificial Sequence
  Linker 3 subregion of Human ADAMTS13 protein with a single point mutation P1182V
AAAPGRTTATPAGASLEWSQARGLLFSPAPQPRRLLPGV

SEQ ID NO: 61 - protein, 1353 aa, Artificial Sequence
  Human ADAMTS13 protein with a single point mutation A1144V
AAGGILHLELLVAVGPDVFQAHQEDTERYVLTNLNIGAELLRDPSLGAQFRVHLVKMVILTEPEGAPNITANLTSSLLSVCGWSQTINPEDDTDPGHADLVLYITRFDLELPDGNRQVRGVTQLGGACSPTWSCLITEDTGFDLGVTIAHEIGHSFGLEHDGAPGSGCGPSGHVMASDGAAPRAGLAWSPCSRRQLLSLLSAGRARCVWDPPRPQPGSAGHPPDAQPGLYYSANEQCRVAFGPKAVACTFAREHLDMCQALSCHTDPLDQSSCSRLLVPLLDGTECGVEKWCSKGRCRSLVELTPIAAVHGRWSSWGPRSPCSRSCGGGVVTRRRQCNNPRPAFGGRACVGADLQAEMCNTQACEKTQLEFMSQQCARTDGQPLRSSPGGASFYHWGAAVPHSQGDALCRHMCRAIGESFIMKRGDSFLDGTRCMPSGPREDGTLSLCVSGSCRTFGCDGRMDSQQVWDRCQVCGGDNSTCSPRKGSFTAGRAREYVTFLTVTPNLTSVYIANHRPLFTHLAVRIGGRYVVAGKMSISPNTTYPSLLEDGRVEYRVALTEDRLPRLEEIRIWGPLQEDADIQVYRRYGEEYGNLTRPDITFTYFQPKPRQAWVWAAVRGPCSVSCGAGLRWVNYSCLDQARKELVETVQCQGSQQPPAWPEACVLEPCPPYWAVGDFGPCSASCGGGLRERPVRCVEAQGSLLKTLPPARCRAGAQQPAVALETCNPQPCPARWEVSEPSSCTSAGGAGLALENETCVPGADGLEAPVTEGPGSVDEKLPAPEPCVGMSCPPGWGHLDATSAGEKAPSPWGSIRTGAQAAHVWTPAAGSCSVSCGRGLMELRFLCMDSALRVPVQEELCGLASKPGSRREVCQAVPCPARWQYKLAACSVSCGRGVVRRILYCARAHGEDDGEEILLDTQCQGLPRPEPQEACSLEPCPPRWKVMSLGPCSASCGLGTARRSVACVQLDQGQDVEVDEAACAALVRPEASVPCLIADCTYRWHVGTWMECSVSCGDGIQRRRDTCLGPQAQAPVPADFCQHLPKPVTVRGCWAGPCVGQGTPSLVPHEEVAAPGRTTATPAGASLEWSQARGLLFSPAPQPRRLLPGPQENSVQSSACGRQHLEPTGTIDMRGPGQADCAVAIGRPLGEVVTLRVLESSLNCSAGDMLLLWGRLTWRKMCRKLLDMTFSSKTNTLVVRQRCGRPGGGVLLRYGSQLAPETFYRECDMQLFGPWGEIVSPSLSPATSNAGGCRLFINVAPHARIAIHALATNMGAGTEGANASYILIRDTHSLRTTAFHGQQVLYWESESSQAEMEFSEGFLKAQASLRGQYWTLQSWVPEMQDPQSWKGKEGT

SEQ ID NO: 62 - protein, 1353 aa, Artificial Sequence
  Human ADAMTS13 protein with a single point mutation A1145V
AAGGILHLELLVAVGPDVFQAHQEDTERYVLTNLNIGAELLRDPSLGAQFRVHLVKMVILTEPEGAPNITANLTSSLLSVCGWSQTINPEDDTDPGHADLVLYITRFDLELPDGNRQVRGVTQLGGACSPTWSCLITEDTGFDLGVTIAHEIGHSFGLEHDGAPGSGCGPSGHVMASDGAAPRAGLAWSPCSRRQLLSLLSAGRARCVWDPPRPQPGSAGHPPDAQPGLYYSANEQCRVAFGPKAVACTFAREHLDMCQALSCHTDPLDQSSCSRLLVPLLDGTECGVEKWCSKGRCRSLVELTPIAAVHGRWSSWGPRSPCSRSCGGGVVTRRRQCNNPRPAFGGRACVGADLQAEMCNTQACEKTQLEFMSQQCARTDGQPLRSSPGGASFYHWGAAVPHSQGDALCRHMCRAIGESFIMKRGDSFLDGTRCMPSGPREDGTLSLCVSGSCRTFGCDGRMDSQQVWDRCQVCGGDNSTCSPRKGSFTAGRAREYVTFLTVTPNLTSVYIANHRPLFTHLAVRIGGRYVVAGKMSISPNTTYPSLLEDGRVEYRVALTEDRLPRLEEIRIWGPLQEDADIQVYRRYGEEYGNLTRPDITFTYFQPKPRQAWVWAAVRGPCSVSCGAGLRWVNYSCLDQARKELVETVQCQGSQQPPAWPEACVLEPCPPYWAVGDFGPCSASCGGGLRERPVRCVEAQGSLLKTLPPARCRAGAQQPAVALETCNPQPCPARWEVSEPSSCTSAGGAGLALENETCVPGADGLEAPVTEGPGSVDEKLPAPEPCVGMSCPPGWGHLDATSAGEKAPSPWGSIRTGAQAAHVWTPAAGSCSVSCGRGLMELRFLCMDSALRVPVQEELCGLASKPGSRREVCQAVPCPARWQYKLAACSVSCGRGVVRRILYCARAHGEDDGEEILLDTQCQGLPRPEPQEACSLEPCPPRWKVMSLGPCSASCGLGTARRSVACVQLDQGQDVEVDEAACAALVRPEASVPCLIADCTYRWHVGTWMECSVSCGDGIQRRRDTCLGPQAQAPVPADFCQHLPKPVTVRGCWAGPCVGQGTPSLVPHEEAVAPGRTTATPAGASLEWSQARGLLFSPAPQPRRLLPGPQENSVQSSACGRQHLEPTGTIDMRGPGQADCAVAIGRPLGEVVTLRVLESSLNCSAGDMLLLWGRLTWRKMCRKLLDMTFSSKTNTLVVRQRCGRPGGGVLLRYGSQLAPETFYRECDMQLFGPWGEIVSPSLSPATSNAGGCRLFINVAPHARIAIHALATNMGAGTEGANASYILIRDTHSLRTTAFHGQQVLYWESESSQAEMEFSEGFLKAQASLRGQYWTLQSWVPEMQDPQSWKGKEGT

SEQ ID NO: 63 - protein, 1353 aa, Artificial Sequence
  Human ADAMTS13 protein with a single point mutation A1146V
AAGGILHLELLVAVGPDVFQAHQEDTERYVLTNLNIGAELLRDPSLGAQFRVHLVKMVILTEPEGAPNITANLTSSLLSVCGWSQTINPEDDTDPGHADLVLYITRFDLELPDGNRQVRGVTQLGGACSPTWSCLITEDTGFDLGVTIAHEIGHSFGLEHDGAPGSGCGPSGHVMASDGAAPRAGLAWSPCSRRQLLSLLSAGRARCVWDPPRPQPGSAGHPPDAQPGLYYSANEQCRVAFGPKAVACTFAREHLDMCQALSCHTDPLDQSSCSRLLVPLLDGTECGVEKWCSKGRCRSLVELTPIAAVHGRWSSWGPRSPCSRSCGGGVVTRRRQCNNPRPAFGGRACVGADLQAEMCNTQACEKTQLEFMSQQCARTDGQPLRSSPGGASFYHWGAAVPHSQGDALCRHMCRAIGESFIMKRGDSFLDGTRCMPSGPREDGTLSLCVSGSCRTFGCDGRMDSQQVWDRCQVCGGDNSTCSPRKGSFTAGRAREYVTFLTVTPNLTSVYIANHRPLFTHLAVRIGGRYVVAGKMSISPNTTYPSLLEDGRVEYRVALTEDRLPRLEEIRIWGPLQEDADIQVYRRYGEEYGNLTRPDITFTYFQPKPRQAWVWAAVRGPCSVSCGAGLRWVNYSCLDQARKELVETVQCQGSQQPPAWPEACVLEPCPPYWAVGDFGPCSASCGGGLRERPVRCVEAQGSLLKTLPPARCRAGAQQPAVALETCNPQPCPARWEVSEPSSCTSAGGAGLALENETCVPGADGLEAPVTEGPGSVDEKLPAPEPCVGMSCPPGWGHLDATSAGEKAPSPWGSIRTGAQAAHVWTPAAGSCSVSCGRGLMELRFLCMDSALRVPVQEELCGLASKPGSRREVCQAVPCPARWQYKLAACSVSCGRGVVRRILYCARAHGEDDGEEILLDTQCQGLPRPEPQEACSLEPCPPRWKVMSLGPCSASCGLGTARRSVACVQLDQGQDVEVDEAACAALVRPEASVPCLIADCTYRWHVGTWMECSVSCGDGIQRRRDTCLGPQAQAPVPADFCQHLPKPVTVRGCWAGPCVGQGTPSLVPHEEAAVPGRTTATPAGASLEWSQARGLLFSPAPQPRRLLPGPQENSVQSSACGRQHLEPTGTIDMRGPGQADCAVAIGRPLGEVVTLRVLESSLNCSAGDMLLLWGRLTWRKMCRKLLDMTFSSKTNTLVVRQRCGRPGGGVLLRYGSQLAPETFYRECDMQLFGPWGEIVSPSLSPATSNAGGCRLFINVAPHARIAIHALATNMGAGTEGANASYILIRDTHSLRTTAFHGQQVLYWESESSQAEMEFSEGFLKAQASLRGQYWTLQSWVPEMQDPQSWKGKEGT

SEQ ID NO: 64 - protein, 1353 aa, Artificial Sequence
  Human ADAMTS13 protein with a single point mutation P1147V
AAGGILHLELLVAVGPDVFQAHQEDTERYVLTNLNIGAELLRDPSLGAQFRVHLVKMVILTEPEGAPNITANLTSSLLSVCGWSQTINPEDDTDPGHADLVLYITRFDLELPDGNRQVRGVTQLGGACSPTWSCLITEDTGFDLGVTIAHEIGHSFGLEHDGAPGSGCGPSGHVMASDGAAPRAGLAWSPCSRRQLLSLLSAGRARCVWDPPRPQPGSAGHPPDAQPGLYYSANEQCRVAFGPKAVACTFAREHLDMCQALSCHTDPLDQSSCSRLLVPLLDGTECGVEKWCSKGRCRSLVELTPIAAVHGRWSSWGPRSPCSRSCGGGVVTRRRQCNNPRPAFGGRACVGADLQAEMCNTQACEKTQLEFMSQQCARTDGQPLRSSPGGASFYHWGAAVPHSQGDALCRHMCRAIGESFIMKRGDSFLDGTRCMPSGPREDGTLSLCVSGSCRTFGCDGRMDSQQVWDRCQVCGGDNSTCSPRKGSFTAGRAREYVTFLTVTPNLTSVYIANHRPLFTHLAVRIGGRYVVAGKMSISPNTTYPSLLEDGRVEYRVALTEDRLPRLEEIRIWGPLQEDADIQVYRRYGEEYGNLTRPDITFTYFQPKPRQAWVWAAVRGPCSVSCGAGLRWVNYSCLDQARKELVETVQCQGSQQPPAWPEACVLEPCPPYWAVGDFGPCSASCGGGLRERPVRCVEAQGSLLKTLPPARCRAGAQQPAVALETCNPQPCPARWEVSEPSSCTSAGGAGLALENETCVPGADGLEAPVTEGPGSVDEKLPAPEPCVGMSCPPGWGHLDATSAGEKAPSPWGSIRTGAQAAHVWTPAAGSCSVSCGRGLMELRFLCMDSALRVPVQEELCGLASKPGSRREVCQAVPCPARWQYKLAACSVSCGRGVVRRILYCARAHGEDDGEEILLDTQCQGLPRPEPQEACSLEPCPPRWKVMSLGPCSASCGLGTARRSVACVQLDQGQDVEVDEAACAALVRPEASVPCLIADCTYRWHVGTWMECSVSCGDGIQRRRDTCLGPQAQAPVPADFCQHLPKPVTVRGCWAGPCVGQGTPSLVPHEEAAAVGRTTATPAGASLEWSQARGLLFSPAPQPRRLLPGPQENSVQSSACGRQHLEPTGTIDMRGPGQADCAVAIGRPLGEVVTLRVLESSLNCSAGDMLLLWGRLTWRKMCRKLLDMTFSSKTNTLVVRQRCGRPGGGVLLRYGSQLAPETFYRECDMQLFGPWGEIVSPSLSPATSNAGGCRLFINVAPHARIAIHALATNMGAGTEGANASYILIRDTHSLRTTAFHGQQVLYWESESSQAEMEFSEGFLKAQASLRGQYWTLQSWVPEMQDPQSWKGKEGT

SEQ ID NO: 65 - protein, 1353 aa, Artificial Sequence
  Human ADAMTS13 protein with a single point mutation P1154V
AAGGILHLELLVAVGPDVFQAHQEDTERYVLTNLNIGAELLRDPSLGAQFRVHLVKMVILTEPEGAPNITANLTSSLLSVCGWSQTINPEDDTDPGHADLVLYITRFDLELPDGNRQVRGVTQLGGACSPTWSCLITEDTGFDLGVTIAHEIGHSFGLEHDGAPGSGCGPSGHVMASDGAAPRAGLAWSPCSRRQLLSLLSAGRARCVWDPPRPQPGSAGHPPDAQPGLYYSANEQCRVAFGPKAVACTFAREHLDMCQALSCHTDPLDQSSCSRLLVPLLDGTECGVEKWCSKGRCRSLVELTPIAAVHGRWSSWGPRSPCSRSCGGGVVTRRRQCNNPRPAFGGRACVGADLQAEMCNTQACEKTQLEFMSQQCARTDGQPLRSSPGGASFYHWGAAVPHSQGDALCRHMCRAIGESFIMKRGDSFLDGTRCMPSGPREDGTLSLCVSGSCRTFGCDGRMDSQQVWDRCQVCGGDNSTCSPRKGSFTAGRAREYVTFLTVTPNLTSVYIANHRPLFTHLAVRIGGRYVVAGKMSISPNTTYPSLLEDGRVEYRVALTEDRLPRLEEIRIWGPLQEDADIQVYRRYGEEYGNLTRPDITFTYFQPKPRQAWVWAAVRGPCSVSCGAGLRWVNYSCLDQARKELVETVQCQGSQQPPAWPEACVLEPCPPYWAVGDFGPCSASCGGGLRERPVRCVEAQGSLLKTLPPARCRAGAQQPAVALETCNPQPCPARWEVSEPSSCTSAGGAGLALENETCVPGADGLEAPVTEGPGSVDEKLPAPEPCVGMSCPPGWGHLDATSAGEKAPSPWGSIRTGAQAAHVWTPAAGSCSVSCGRGLMELRFLCMDSALRVPVQEELCGLASKPGSRREVCQAVPCPARWQYKLAACSVSCGRGVVRRILYCARAHGEDDGEEILLDTQCQGLPRPEPQEACSLEPCPPRWKVMSLGPCSASCGLGTARRSVACVQLDQGQDVEVDEAACAALVRPEASVPCLIADCTYRWHVGTWMECSVSCGDGIQRRRDTCLGPQAQAPVPADFCQHLPKPVTVRGCWAGPCVGQGTPSLVPHEEAAAPGRTTATVAGASLEWSQARGLLFSPAPQPRRLLPGPQENSVQSSACGRQHLEPTGTIDMRGPGQADCAVAIGRPLGEVVTLRVLESSLNCSAGDMLLLWGRLTWRKMCRKLLDMTFSSKTNTLVVRQRCGRPGGGVLLRYGSQLAPETFYRECDMQLFGPWGEIVSPSLSPATSNAGGCRLFINVAPHARIAIHALATNMGAGTEGANASYILIRDTHSLRTTAFHGQQVLYWESESSQAEMEFSEGFLKAQASLRGQYWTLQSWVPEMQDPQSWKGKEGT

SEQ ID NO: 66 - protein, 1353 aa, Artificial Sequence
  Human ADAMTS13 protein with a single point mutation P1171V
AAGGILHLELLVAVGPDVFQAHQEDTERYVLTNLNIGAELLRDPSLGAQFRVHLVKMVILTEPEGAPNITANLTSSLLSVCGWSQTINPEDDTDPGHADLVLYITRFDLELPDGNRQVRGVTQLGGACSPTWSCLITEDTGFDLGVTIAHEIGHSFGLEHDGAPGSGCGPSGHVMASDGAAPRAGLAWSPCSRRQLLSLLSAGRARCVWDPPRPQPGSAGHPPDAQPGLYYSANEQCRVAFGPKAVACTFAREHLDMCQALSCHTDPLDQSSCSRLLVPLLDGTECGVEKWCSKGRCRSLVELTPIAAVHGRWSSWGPRSPCSRSCGGGVVTRRRQCNNPRPAFGGRACVGADLQAEMCNTQACEKTQLEFMSQQCARTDGQPLRSSPGGASFYHWGAAVPHSQGDALCRHMCRAIGESFIMKRGDSFLDGTRCMPSGPREDGTLSLCVSGSCRTFGCDGRMDSQQVWDRCQVCGGDNSTCSPRKGSFTAGRAREYVTFLTVTPNLTSVYIANHRPLFTHLAVRIGGRYVVAGKMSISPNTTYPSLLEDGRVEYRVALTEDRLPRLEEIRIWGPLQEDADIQVYRRYGEEYGNLTRPDITFTYFQPKPRQAWVWAAVRGPCSVSCGAGLRWVNYSCLDQARKELVETVQCQGSQQPPAWPEACVLEPCPPYWAVGDFGPCSASCGGGLRERPVRCVEAQGSLLKTLPPARCRAGAQQPAVALETCNPQPCPARWEVSEPSSCTSAGGAGLALENETCVPGADGLEAPVTEGPGSVDEKLPAPEPCVGMSCPPGWGHLDATSAGEKAPSPWGSIRTGAQAAHVWTPAAGSCSVSCGRGLMELRFLCMDSALRVPVQEELCGLASKPGSRREVCQAVPCPARWQYKLAACSVSCGRGVVRRILYCARAHGEDDGEEILLDTQCQGLPRPEPQEACSLEPCPPRWKVMSLGPCSASCGLGTARRSVACVQLDQGQDVEVDEAACAALVRPEASVPCLIADCTYRWHVGTWMECSVSCGDGIQRRRDTCLGPQAQAPVPADFCQHLPKPVTVRGCWAGPCVGQGTPSLVPHEEAAAPGRTTATPAGASLEWSQARGLLFSVAPQPRRLLPGPQENSVQSSACGRQHLEPTGTIDMRGPGQADCAVAIGRPLGEVVTLRVLESSLNCSAGDMLLLWGRLTWRKMCRKLLDMTFSSKTNTLVVRQRCGRPGGGVLLRYGSQLAPETFYRECDMQLFGPWGEIVSPSLSPATSNAGGCRLFINVAPHARIAIHALATNMGAGTEGANASYILIRDTHSLRTTAFHGQQVLYWESESSQAEMEFSEGFLKAQASLRGQYWTLQSWVPEMQDPQSWKGKEGT

SEQ ID NO: 67 - protein, 1353 aa, Artificial Sequence
  Human ADAMTS13 protein with a single point mutation P1173V
AAGGILHLELLVAVGPDVFQAHQEDTERYVLTNLNIGAELLRDPSLGAQFRVHLVKMVILTEPEGAPNITANLTSSLLSVCGWSQTINPEDDTDPGHADLVLYITRFDLELPDGNRQVRGVTQLGGACSPTWSCLITEDTGFDLGVTIAHEIGHSFGLEHDGAPGSGCGPSGHVMASDGAAPRAGLAWSPCSRRQLLSLLSAGRARCVWDPPRPQPGSAGHPPDAQPGLYYSANEQCRVAFGPKAVACTFAREHLDMCQALSCHTDPLDQSSCSRLLVPLLDGTECGVEKWCSKGRCRSLVELTPIAAVHGRWSSWGPRSPCSRSCGGGVVTRRRQCNNPRPAFGGRACVGADLQAEMCNTQACEKTQLEFMSQQCARTDGQPLRSSPGGASFYHWGAAVPHSQGDALCRHMCRAIGESFIMKRGDSFLDGTRCMPSGPREDGTLSLCVSGSCRTFGCDGRMDSQQVWDRCQVCGGDNSTCSPRKGSFTAGRAREYVTFLTVTPNLTSVYIANHRPLFTHLAVRIGGRYVVAGKMSISPNTTYPSLLEDGRVEYRVALTEDRLPRLEEIRIWGPLQEDADIQVYRRYGEEYGNLTRPDITFTYFQPKPRQAWVWAAVRGPCSVSCGAGLRWVNYSCLDQARKELVETVQCQGSQQPPAWPEACVLEPCPPYWAVGDFGPCSASCGGGLRERPVRCVEAQGSLLKTLPPARCRAGAQQPAVALETCNPQPCPARWEVSEPSSCTSAGGAGLALENETCVPGADGLEAPVTEGPGSVDEKLPAPEPCVGMSCPPGWGHLDATSAGEKAPSPWGSIRTGAQAAHVWTPAAGSCSVSCGRGLMELRFLCMDSALRVPVQEELCGLASKPGSRREVCQAVPCPARWQYKLAACSVSCGRGVVRRILYCARAHGEDDGEEILLDTQCQGLPRPEPQEACSLEPCPPRWKVMSLGPCSASCGLGTARRSVACVQLDQGQDVEVDEAACAALVRPEASVPCLIADCTYRWHVGTWMECSVSCGDGIQRRRDTCLGPQAQAPVPADFCQHLPKPVTVRGCWAGPCVGQGTPSLVPHEEAAAPGRTTATPAGASLEWSQARGLLFSPAVQPRRLLPGPQENSVQSSACGRQHLEPTGTIDMRGPGQADCAVAIGRPLGEVVTLRVLESSLNCSAGDMLLLWGRLTWRKMCRKLLDMTFSSKTNTLVVRQRCGRPGGGVLLRYGSQLAPETFYRECDMQLFGPWGEIVSPSLSPATSNAGGCRLFINVAPHARIAIHALATNMGAGTEGANASYILIRDTHSLRTTAFHGQQVLYWESESSQAEMEFSEGFLKAQASLRGQYWTLQSWVPEMQDPQSWKGKEGT

SEQ ID NO: 68 - protein, 1353 aa, Artificial Sequence
  Human ADAMTS13 protein with a single point mutation P1175V
AAGGILHLELLVAVGPDVFQAHQEDTERYVLTNLNIGAELLRDPSLGAQFRVHLVKMVILTEPEGAPNITANLTSSLLSVCGWSQTINPEDDTDPGHADLVLYITRFDLELPDGNRQVRGVTQLGGACSPTWSCLITEDTGFDLGVTIAHEIGHSFGLEHDGAPGSGCGPSGHVMASDGAAPRAGLAWSPCSRRQLLSLLSAGRARCVWDPPRPQPGSAGHPPDAQPGLYYSANEQCRVAFGPKAVACTFAREHLDMCQALSCHTDPLDQSSCSRLLVPLLDGTECGVEKWCSKGRCRSLVELTPIAAVHGRWSSWGPRSPCSRSCGGGVVTRRRQCNNPRPAFGGRACVGADLQAEMCNTQACEKTQLEFMSQQCARTDGQPLRSSPGGASFYHWGAAVPHSQGDALCRHMCRAIGESFIMKRGDSFLDGTRCMPSGPREDGTLSLCVSGSCRTFGCDGRMDSQQVWDRCQVCGGDNSTCSPRKGSFTAGRAREYVTFLTVTPNLTSVYIANHRPLFTHLAVRIGGRYVVAGKMSISPNTTYPSLLEDGRVEYRVALTEDRLPRLEEIRIWGPLQEDADIQVYRRYGEEYGNLTRPDITFTYFQPKPRQAWVWAAVRGPCSVSCGAGLRWVNYSCLDQARKELVETVQCQGSQQPPAWPEACVLEPCPPYWAVGDFGPCSASCGGGLRERPVRCVEAQGSLLKTLPPARCRAGAQQPAVALETCNPQPCPARWEVSEPSSCTSAGGAGLALENETCVPGADGLEAPVTEGPGSVDEKLPAPEPCVGMSCPPGWGHLDATSAGEKAPSPWGSIRTGAQAAHVWTPAAGSCSVSCGRGLMELRFLCMDSALRVPVQEELCGLASKPGSRREVCQAVPCPARWQYKLAACSVSCGRGVVRRILYCARAHGEDDGEEILLDTQCQGLPRPEPQEACSLEPCPPRWKVMSLGPCSASCGLGTARRSVACVQLDQGQDVEVDEAACAALVRPEASVPCLIADCTYRWHVGTWMECSVSCGDGIQRRRDTCLGPQAQAPVPADFCQHLPKPVTVRGCWAGPCVGQGTPSLVPHEEAAAPGRTTATPAGASLEWSQARGLLFSPAPQVRRLLPGPQENSVQSSACGRQHLEPTGTIDMRGPGQADCAVAIGRPLGEVVTLRVLESSLNCSAGDMLLLWGRLTWRKMCRKLLDMTFSSKTNTLVVRQRCGRPGGGVLLRYGSQLAPETFYRECDMQLFGPWGEIVSPSLSPATSNAGGCRLFINVAPHARIAIHALATNMGAGTEGANASYILIRDTHSLRTTAFHGQQVLYWESESSQAEMEFSEGFLKAQASLRGQYWTLQSWVPEMQDPQSWKGKEGT

SEQ ID NO: 69 - protein, 1353 aa, Artificial Sequence
  Human ADAMTS13 protein with a single point mutation P1180V
AAGGILHLELLVAVGPDVFQAHQEDTERYVLTNLNIGAELLRDPSLGAQFRVHLVKMVILTEPEGAPNITANLTSSLLSVCGWSQTINPEDDTDPGHADLVLYITRFDLELPDGNRQVRGVTQLGGACSPTWSCLITEDTGFDLGVTIAHEIGHSFGLEHDGAPGSGCGPSGHVMASDGAAPRAGLAWSPCSRRQLLSLLSAGRARCVWDPPRPQPGSAGHPPDAQPGLYYSANEQCRVAFGPKAVACTFAREHLDMCQALSCHTDPLDQSSCSRLLVPLLDGTECGVEKWCSKGRCRSLVELTPIAAVHGRWSSWGPRSPCSRSCGGGVVTRRRQCNNPRPAFGGRACVGADLQAEMCNTQACEKTQLEFMSQQCARTDGQPLRSSPGGASFYHWGAAVPHSQGDALCRHMCRAIGESFIMKRGDSFLDGTRCMPSGPREDGTLSLCVSGSCRTFGCDGRMDSQQVWDRCQVCGGDNSTCSPRKGSFTAGRAREYVTFLTVTPNLTSVYIANHRPLFTHLAVRIGGRYVVAGKMSISPNTTYPSLLEDGRVEYRVALTEDRLPRLEEIRIWGPLQEDADIQVYRRYGEEYGNLTRPDITFTYFQPKPRQAWVWAAVRGPCSVSCGAGLRWVNYSCLDQARKELVETVQCQGSQQPPAWPEACVLEPCPPYWAVGDFGPCSASCGGGLRERPVRCVEAQGSLLKTLPPARCRAGAQQPAVALETCNPQPCPARWEVSEPSSCTSAGGAGLALENETCVPGADGLEAPVTEGPGSVDEKLPAPEPCVGMSCPPGWGHLDATSAGEKAPSPWGSIRTGAQAAHVWTPAAGSCSVSCGRGLMELRFLCMDSALRVPVQEELCGLASKPGSRREVCQAVPCPARWQYKLAACSVSCGRGVVRRILYCARAHGEDDGEEILLDTQCQGLPRPEPQEACSLEPCPPRWKVMSLGPCSASCGLGTARRSVACVQLDQGQDVEVDEAACAALVRPEASVPCLIADCTYRWHVGTWMECSVSCGDGIQRRRDTCLGPQAQAPVPADFCQHLPKPVTVRGCWAGPCVGQGTPSLVPHEEAAAPGRTTATPAGASLEWSQARGLLFSPAPQPRRLLVGPQENSVQSSACGRQHLEPTGTIDMRGPGQADCAVAIGRPLGEVVTLRVLESSLNCSAGDMLLLWGRLTWRKMCRKLLDMTFSSKTNTLVVRQRCGRPGGGVLLRYGSQLAPETFYRECDMQLFGPWGEIVSPSLSPATSNAGGCRLFINVAPHARIAIHALATNMGAGTEGANASYILIRDTHSLRTTAFHGQQVLYWESESSQAEMEFSEGFLKAQASLRGQYWTLQSWVPEMQDPQSWKGKEGT

SEQ ID NO: 70 - protein, 1353 aa, Artificial Sequence
  Human ADAMTS13 protein with a single point mutation P1182V
AAGGILHLELLVAVGPDVFQAHQEDTERYVLTNLNIGAELLRDPSLGAQFRVHLVKMVILTEPEGAPNITANLTSSLLSVCGWSQTINPEDDTDPGHADLVLYITRFDLELPDGNRQVRGVTQLGGACSPTWSCLITEDTGFDLGVTIAHEIGHSFGLEHDGAPGSGCGPSGHVMASDGAAPRAGLAWSPCSRRQLLSLLSAGRARCVWDPPRPQPGSAGHPPDAQPGLYYSANEQCRVAFGPKAVACTFAREHLDMCQALSCHTDPLDQSSCSRLLVPLLDGTECGVEKWCSKGRCRSLVELTPIAAVHGRWSSWGPRSPCSRSCGGGVVTRRRQCNNPRPAFGGRACVGADLQAEMCNTQACEKTQLEFMSQQCARTDGQPLRSSPGGASFYHWGAAVPHSQGDALCRHMCRAIGESFIMKRGDSFLDGTRCMPSGPREDGTLSLCVSGSCRTFGCDGRMDSQQVWDRCQVCGGDNSTCSPRKGSFTAGRAREYVTFLTVTPNLTSVYIANHRPLFTHLAVRIGGRYVVAGKMSISPNTTYPSLLEDGRVEYRVALTEDRLPRLEEIRIWGPLQEDADIQVYRRYGEEYGNLTRPDITFTYFQPKPRQAWVWAAVRGPCSVSCGAGLRWVNYSCLDQARKELVETVQCQGSQQPPAWPEACVLEPCPPYWAVGDFGPCSASCGGGLRERPVRCVEAQGSLLKTLPPARCRAGAQQPAVALETCNPQPCPARWEVSEPSSCTSAGGAGLALENETCVPGADGLEAPVTEGPGSVDEKLPAPEPCVGMSCPPGWGHLDATSAGEKAPSPWGSIRTGAQAAHVWTPAAGSCSVSCGRGLMELRFLCMDSALRVPVQEELCGLASKPGSRREVCQAVPCPARWQYKLAACSVSCGRGVVRRILYCARAHGEDDGEEILLDTQCQGLPRPEPQEACSLEPCPPRWKVMSLGPCSASCGLGTARRSVACVQLDQGQDVEVDEAACAALVRPEASVPCLIADCTYRWHVGTWMECSVSCGDGIQRRRDTCLGPQAQAPVPADFCQHLPKPVTVRGCWAGPCVGQGTPSLVPHEEAAAPGRTTATPAGASLEWSQARGLLFSPAPQPRRLLPGVQENSVQSSACGRQHLEPTGTIDMRGPGQADCAVAIGRPLGEVVTLRVLESSLNCSAGDMLLLWGRLTWRKMCRKLLDMTFSSKTNTLVVRQRCGRPGGGVLLRYGSQLAPETFYRECDMQLFGPWGEIVSPSLSPATSNAGGCRLFINVAPHARIAIHALATNMGAGTEGANASYILIRDTHSLRTTAFHGQQVLYWESESSQAEMEFSEGFLKAQASLRGQYWTLQSWVPEMQDPQSWKGKEGT

SEQ ID NO: 71 - protein, 1353 aa, Artificial Sequence
  Human ADAMTS13 protein with point mutations R568K/F592Y/R660K/Y661F/Y665F
AAGGILHLELLVAVGPDVFQAHQEDTERYVLTNLNIGAELLRDPSLGAQFRVHLVKMVILTEPEGAPNITANLTSSLLSVCGWSQTINPEDDTDPGHADLVLYITRFDLELPDGNRQVRGVTQLGGACSPTWSCLITEDTGFDLGVTIAHEIGHSFGLEHDGAPGSGCGPSGHVMASDGAAPRAGLAWSPCSRRQLLSLLSAGRARCVWDPPRPQPGSAGHPPDAQPGLYYSANEQCRVAFGPKAVACTFAREHLDMCQALSCHTDPLDQSSCSRLLVPLLDGTECGVEKWCSKGRCRSLVELTPIAAVHGRWSSWGPRSPCSRSCGGGVVTRRRQCNNPRPAFGGRACVGADLQAEMCNTQACEKTQLEFMSQQCARTDGQPLRSSPGGASFYHWGAAVPHSQGDALCRHMCRAIGESFIMKRGDSFLDGTRCMPSGPREDGTLSLCVSGSCRTFGCDGRMDSQQVWDRCQVCGGDNSTCSPRKGSFTAGRAKEYVTFLTVTPNLTSVYIANHRPLYTHLAVRIGGRYVVAGKMSISPNTTYPSLLEDGRVEYRVALTEDRLPRLEEIRIWGPLQEDADIQVYRKFGEEFGNLTRPDITFTYFQPKPRQAWVWAAVRGPCSVSCGAGLRWVNYSCLDQARKELVETVQCQGSQQPPAWPEACVLEPCPPYWAVGDFGPCSASCGGGLRERPVRCVEAQGSLLKTLPPARCRAGAQQPAVALETCNPQPCPARWEVSEPSSCTSAGGAGLALENETCVPGADGLEAPVTEGPGSVDEKLPAPEPCVGMSCPPGWGHLDATSAGEKAPSPWGSIRTGAQAAHVWTPAAGSCSVSCGRGLMELRFLCMDSALRVPVQEELCGLASKPGSRREVCQAVPCPARWQYKLAACSVSCGRGVVRRILYCARAHGEDDGEEILLDTQCQGLPRPEPQEACSLEPCPPRWKVMSLGPCSASCGLGTARRSVACVQLDQGQDVEVDEAACAALVRPEASVPCLIADCTYRWHVGTWMECSVSCGDGIQRRRDTCLGPQAQAPVPADFCQHLPKPVTVRGCWAGPCVGQGTPSLVPHEEAAAPGRTTATPAGASLEWSQARGLLFSPAPQPRRLLPGPQENSVQSSACGRQHLEPTGTIDMRGPGQADCAVAIGRPLGEVVTLRVLESSLNCSAGDMLLLWGRLTWRKMCRKLLDMTFSSKTNTLVVRQRCGRPGGGVLLRYGSQLAPETFYRECDMQLFGPWGEIVSPSLSPATSNAGGCRLFINVAPHARIAIHALATNMGAGTEGANASYILIRDTHSLRTTAFHGQQVLYWESESSQAEMEFSEGFLKAQASLRGQYWTLQSWVPEMQDPQSWKGKEGT

SEQ ID NO: 72 - protein, 1453 aa, Homo sapiens
MHQRHPRARCPPLCVAGILACGFLLGCWGPSHFQQSCLQALEPQAVSSYLSPGAPLKGRPPSPGFQRQRQRQRRAAGGILHLELLVAVGPDVFQAHQEDTERYVLTNLNIGAELLRDPSLGAQFRVHLVKMVILTEPEGAPNITANLTSSLLSVCGWSQTINPEDDTDPGHADLVLYITRFDLELPDGNRQVRGVTQLGGACSPTWSCLITEDTGFDLGVTIAHEIGHSFGLEHDGAPGSGCGPSGHVMASDGAAPRAGLAWSPCSRRQLLSLLSAGRARCVWDPPRPQPGSAGHPPDAQPGLYYSANEQCRVAFGPKAVACTFAREHLDMCQALSCHTDPLDQSSCSRLLVPLLDGTECGVEKWCSKGRCRSLVELTPIAAVHGRWSSWGPRSPCSRSCGGGVVTRRRQCNNPRPAFGGRACVGADLQAEMCNTQACEKTQLEFMSQQCARTDGQPLRSSPGGASFYHWGAAVPHSQGDALCRHMCRAIGESFIMKRGDSFLDGTRCMPSGPREDGTLSLCVSGSCRTFGCDGRMDSQQVWDRCQVCGGDNSTCSPRKGSFTAGRAREYVTFLTVTPNLTSVYIANHRPLFTHLAVRIGGRYVVAGKMSISPNTTYPSLLEDGRVEYRVALTEDRLPRLEEIRIWGPLQEDADIQVYRRYGEEYGNLTRPDITFTYFQPKPRQAWVWAAVRGPCSVSCGAGLRWVNYSCLDQARKELVETVQCQGSQQPPAWPEACVLEPCPPYWAVGDFGPCSASCGGGLRERPVRCVEAQGSLLKTLPPARCRAGAQQPAVALETCNPQPCPARWEVSEPSSCTSAGGAGLALENETCVPGADGLEAPVTEGPGSVDEKLPAPEPCVGMSCPPGWGHLDATSAGEKAPSPWGSIRTGAQAAHVWTPAAGSCSVSCGRGLMELRFLCMDSALRVPVQEELCGLASKPGSRREVCQAVPCPARWQYKLAACSVSCGRGVVRRILYCARAHGEDDGEEILLDTQCQGLPRPEPQEACSLEPCPPRWKVMSLGPCSASCGLGTARRSVACVQLDQGQDVEVDEAACAALVRPEASVPCLIADCTYRWHVGTWMECSVSCGDGIQRRRDTCLGPQAQAPVPADFCQHLPKPVTVRGCWAGPCVGQGTPSLVPHEEAAAPGRTTATPAGASLEWSQARGLLFSPAPQPRRLLPGPQENSVQSSACGRQHLEPTGTIDMRGPGQADCAVAIGRPLGEVVTLRVLESSLNCSAGDMLLLWGRLTWRKMCRKLLDMTFSSKTNTLVVRQRCGRPGGGVLLRYGSQLAPETFYRECDMQLFGPWGEIVSPSLSPATSNAGGCRLFINVAPHARIAIHALATNMGAGTEGANASYILIRDTHSLRTTAFHGQQVLYWESESSQAEMEFSEGFLKAQASLRGQYWTLQSWVPEMQDPQSWKGKEGTSRGPFEQKLISEEDLNMHTGHHHHHH

SEQ ID NO: 73 - protein, 1453 aa, Artificial Sequence
  Human ADAMTS13 protein with point mutations R568K/F592Y/R660K/Y661F/Y665F
MHQRHPRARCPPLCVAGILACGFLLGCWGPSHFQQSCLQALEPQAVSSYLSPGAPLKGRPPSPGFQRQRQRQRRAAGGILHLELLVAVGPDVFQAHQEDTERYVLTNLNIGAELLRDPSLGAQFRVHLVKMVILTEPEGAPNITANLTSSLLSVCGWSQTINPEDDTDPGHADLVLYITRFDLELPDGNRQVRGVTQLGGACSPTWSCLITEDTGFDLGVTIAHEIGHSFGLEHDGAPGSGCGPSGHVMASDGAAPRAGLAWSPCSRRQLLSLLSAGRARCVWDPPRPQPGSAGHPPDAQPGLYYSANEQCRVAFGPKAVACTFAREHLDMCQALSCHTDPLDQSSCSRLLVPLLDGTECGVEKWCSKGRCRSLVELTPIAAVHGRWSSWGPRSPCSRSCGGGVVTRRRQCNNPRPAFGGRACVGADLQAEMCNTQACEKTQLEFMSQQCARTDGQPLRSSPGGASFYHWGAAVPHSQGDALCRHMCRAIGESFIMKRGDSFLDGTRCMPSGPREDGTLSLCVSGSCRTFGCDGRMDSQQVWDRCQVCGGDNSTCSPRKGSFTAGRAKEYVTFLTVTPNLTSVYIANHRPLYTHLAVRIGGRYVVAGKMSISPNTTYPSLLEDGRVEYRVALTEDRLPRLEEIRIWGPLQEDADIQVYRKFGEEFGNLTRPDITFTYFQPKPRQAWVWAAVRGPCSVSCGAGLRWVNYSCLDQARKELVETVQCQGSQQPPAWPEACVLEPCPPYWAVGDFGPCSASCGGGLRERPVRCVEAQGSLLKTLPPARCRAGAQQPAVALETCNPQPCPARWEVSEPSSCTSAGGAGLALENETCVPGADGLEAPVTEGPGSVDEKLPAPEPCVGMSCPPGWGHLDATSAGEKAPSPWGSIRTGAQAAHVWTPAAGSCSVSCGRGLMELRFLCMDSALRVPVQEELCGLASKPGSRREVCQAVPCPARWQYKLAACSVSCGRGVVRRILYCARAHGEDDGEEILLDTQCQGLPRPEPQEACSLEPCPPRWKVMSLGPCSASCGLGTARRSVACVQLDQGQDVEVDEAACAALVRPEASVPCLIADCTYRWHVGTWMECSVSCGDGIQRRRDTCLGPQAQAPVPADFCQHLPKPVTVRGCWAGPCVGQGTPSLVPHEEAAAPGRTTATPAGASLEWSQARGLLFSPAPQPRRLLPGPQENSVQSSACGRQHLEPTGTIDMRGPGQADCAVAIGRPLGEVVTLRVLESSLNCSAGDMLLLWGRLTWRKMCRKLLDMTFSSKTNTLVVRQRCGRPGGGVLLRYGSQLAPETFYRECDMQLFGPWGEIVSPSLSPATSNAGGCRLFINVAPHARIAIHALATNMGAGTEGANASYILIRDTHSLRTTAFHGQQVLYWESESSQAEMEFSEGFLKAQASLRGQYWTLQSWVPEMQDPQSWKGKEGTSRGPFEQKLISEEDLNMHTGHHHHHH

SEQ ID NO: 74 - protein, 1453 aa, Artificial Sequence
  Human ADAMTS13 protein with a single point mutation A1144V
MHQRHPRARCPPLCVAGILACGFLLGCWGPSHFQQSCLQALEPQAVSSYLSPGAPLKGRPPSPGFQRQRQRQRRAAGGILHLELLVAVGPDVFQAHQEDTERYVLTNLNIGAELLRDPSLGAQFRVHLVKMVILTEPEGAPNITANLTSSLLSVCGWSQTINPEDDTDPGHADLVLYITRFDLELPDGNRQVRGVTQLGGACSPTWSCLITEDTGFDLGVTIAHEIGHSFGLEHDGAPGSGCGPSGHVMASDGAAPRAGLAWSPCSRRQLLSLLSAGRARCVWDPPRPQPGSAGHPPDAQPGLYYSANEQCRVAFGPKAVACTFAREHLDMCQALSCHTDPLDQSSCSRLLVPLLDGTECGVEKWCSKGRCRSLVELTPIAAVHGRWSSWGPRSPCSRSCGGGVVTRRRQCNNPRPAFGGRACVGADLQAEMCNTQACEKTQLEFMSQQCARTDGQPLRSSPGGASFYHWGAAVPHSQGDALCRHMCRAIGESFIMKRGDSFLDGTRCMPSGPREDGTLSLCVSGSCRTFGCDGRMDSQQVWDRCQVCGGDNSTCSPRKGSFTAGRAREYVTFLTVTPNLTSVYIANHRPLFTHLAVRIGGRYVVAGKMSISPNTTYPSLLEDGRVEYRVALTEDRLPRLEEIRIWGPLQEDADIQVYRRYGEEYGNLTRPDITFTYFQPKPRQAWVWAAVRGPCSVSCGAGLRWVNYSCLDQARKELVETVQCQGSQQPPAWPEACVLEPCPPYWAVGDFGPCSASCGGGLRERPVRCVEAQGSLLKTLPPARCRAGAQQPAVALETCNPQPCPARWEVSEPSSCTSAGGAGLALENETCVPGADGLEAPVTEGPGSVDEKLPAPEPCVGMSCPPGWGHLDATSAGEKAPSPWGSIRTGAQAAHVWTPAAGSCSVSCGRGLMELRFLCMDSALRVPVQEELCGLASKPGSRREVCQAVPCPARWQYKLAACSVSCGRGVVRRILYCARAHGEDDGEEILLDTQCQGLPRPEPQEACSLEPCPPRWKVMSLGPCSASCGLGTARRSVACVQLDQGQDVEVDEAACAALVRPEASVPCLIADCTYRWHVGTWMECSVSCGDGIQRRRDTCLGPQAQAPVPADFCQHLPKPVTVRGCWAGPCVGQGTPSLVPHEEVAAPGRTTATPAGASLEWSQARGLLFSPAPQPRRLLPGPQENSVQSSACGRQHLEPTGTIDMRGPGQADCAVAIGRPLGEVVTLRVLESSLNCSAGDMLLLWGRLTWRKMCRKLLDMTFSSKTNTLVVRQRCGRPGGGVLLRYGSQLAPETFYRECDMQLFGPWGEIVSPSLSPATSNAGGCRLFINVAPHARIAIHALATNMGAGTEGANASYILIRDTHSLRTTAFHGQQVLYWESESSQAEMEFSEGFLKAQASLRGQYWTLQSWVPEMQDPQSWKGKEGTSRGPFEQKLISEEDLNMHTGHHHHHH

SEQ ID NO: 75 - protein, 1453 aa, Artificial Sequence
  Human ADAMTS13 protein with a single point mutation A1145V
MHQRHPRARCPPLCVAGILACGFLLGCWGPSHFQQSCLQALEPQAVSSYLSPGAPLKGRPPSPGFQRQRQRQRRAAGGILHLELLVAVGPDVFQAHQEDTERYVLTNLNIGAELLRDPSLGAQFRVHLVKMVILTEPEGAPNITANLTSSLLSVCGWSQTINPEDDTDPGHADLVLYITRFDLELPDGNRQVRGVTQLGGACSPTWSCLITEDTGFDLGVTIAHEIGHSFGLEHDGAPGSGCGPSGHVMASDGAAPRAGLAWSPCSRRQLLSLLSAGRARCVWDPPRPQPGSAGHPPDAQPGLYYSANEQCRVAFGPKAVACTFAREHLDMCQALSCHTDPLDQSSCSRLLVPLLDGTECGVEKWCSKGRCRSLVELTPIAAVHGRWSSWGPRSPCSRSCGGGVVTRRRQCNNPRPAFGGRACVGADLQAEMCNTQACEKTQLEFMSQQCARTDGQPLRSSPGGASFYHWGAAVPHSQGDALCRHMCRAIGESFIMKRGDSFLDGTRCMPSGPREDGTLSLCVSGSCRTFGCDGRMDSQQVWDRCQVCGGDNSTCSPRKGSFTAGRAREYVTFLTVTPNLTSVYIANHRPLFTHLAVRIGGRYVVAGKMSISPNTTYPSLLEDGRVEYRVALTEDRLPRLEEIRIWGPLQEDADIQVYRRYGEEYGNLTRPDITFTYFQPKPRQAWVWAAVRGPCSVSCGAGLRWVNYSCLDQARKELVETVQCQGSQQPPAWPEACVLEPCPPYWAVGDFGPCSASCGGGLRERPVRCVEAQGSLLKTLPPARCRAGAQQPAVALETCNPQPCPARWEVSEPSSCTSAGGAGLALENETCVPGADGLEAPVTEGPGSVDEKLPAPEPCVGMSCPPGWGHLDATSAGEKAPSPWGSIRTGAQAAHVWTPAAGSCSVSCGRGLMELRFLCMDSALRVPVQEELCGLASKPGSRREVCQAVPCPARWQYKLAACSVSCGRGVVRRILYCARAHGEDDGEEILLDTQCQGLPRPEPQEACSLEPCPPRWKVMSLGPCSASCGLGTARRSVACVQLDQGQDVEVDEAACAALVRPEASVPCLIADCTYRWHVGTWMECSVSCGDGIQRRRDTCLGPQAQAPVPADFCQHLPKPVTVRGCWAGPCVGQGTPSLVPHEEAVAPGRTTATPAGASLEWSQARGLLFSPAPQPRRLLPGPQENSVQSSACGRQHLEPTGTIDMRGPGQADCAVAIGRPLGEVVTLRVLESSLNCSAGDMLLLWGRLTWRKMCRKLLDMTFSSKTNTLVVRQRCGRPGGGVLLRYGSQLAPETFYRECDMQLFGPWGEIVSPSLSPATSNAGGCRLFINVAPHARIAIHALATNMGAGTEGANASYILIRDTHSLRTTAFHGQQVLYWESESSQAEMEFSEGFLKAQASLRGQYWTLQSWVPEMQDPQSWKGKEGTSRGPFEQKLISEEDLNMHTGHHHHHH

SEQ ID NO: 76 - protein, 1453 aa, Artificial Sequence
  Human ADAMTS13 protein with a single point mutation A1146V
MHQRHPRARCPPLCVAGILACGFLLGCWGPSHFQQSCLQALEPQAVSSYLSPGAPLKGRPPSPGFQRQRQRQRRAAGGILHLELLVAVGPDVFQAHQEDTERYVLTNLNIGAELLRDPSLGAQFRVHLVKMVILTEPEGAPNITANLTSSLLSVCGWSQTINPEDDTDPGHADLVLYITRFDLELPDGNRQVRGVTQLGGACSPTWSCLITEDTGFDLGVTIAHEIGHSFGLEHDGAPGSGCGPSGHVMASDGAAPRAGLAWSPCSRRQLLSLLSAGRARCVWDPPRPQPGSAGHPPDAQPGLYYSANEQCRVAFGPKAVACTFAREHLDMCQALSCHTDPLDQSSCSRLLVPLLDGTECGVEKWCSKGRCRSLVELTPIAAVHGRWSSWGPRSPCSRSCGGGVVTRRRQCNNPRPAFGGRACVGADLQAEMCNTQACEKTQLEFMSQQCARTDGQPLRSSPGGASFYHWGAAVPHSQGDALCRHMCRAIGESFIMKRGDSFLDGTRCMPSGPREDGTLSLCVSGSCRTFGCDGRMDSQQVWDRCQVCGGDNSTCSPRKGSFTAGRAREYVTFLTVTPNLTSVYIANHRPLFTHLAVRIGGRYVVAGKMSISPNTTYPSLLEDGRVEYRVALTEDRLPRLEEIRIWGPLQEDADIQVYRRYGEEYGNLTRPDITFTYFQPKPRQAWVWAAVRGPCSVSCGAGLRWVNYSCLDQARKELVETVQCQGSQQPPAWPEACVLEPCPPYWAVGDFGPCSASCGGGLRERPVRCVEAQGSLLKTLPPARCRAGAQQPAVALETCNPQPCPARWEVSEPSSCTSAGGAGLALENETCVPGADGLEAPVTEGPGSVDEKLPAPEPCVGMSCPPGWGHLDATSAGEKAPSPWGSIRTGAQAAHVWTPAAGSCSVSCGRGLMELRFLCMDSALRVPVQEELCGLASKPGSRREVCQAVPCPARWQYKLAACSVSCGRGVVRRILYCARAHGEDDGEEILLDTQCQGLPRPEPQEACSLEPCPPRWKVMSLGPCSASCGLGTARRSVACVQLDQGQDVEVDEAACAALVRPEASVPCLIADCTYRWHVGTWMECSVSCGDGIQRRRDTCLGPQAQAPVPADFCQHLPKPVTVRGCWAGPCVGQGTPSLVPHEEAAVPGRTTATPAGASLEWSQARGLLFSPAPQPRRLLPGPQENSVQSSACGRQHLEPTGTIDMRGPGQADCAVAIGRPLGEVVTLRVLESSLNCSAGDMLLLWGRLTWRKMCRKLLDMTFSSKTNTLVVRQRCGRPGGGVLLRYGSQLAPETFYRECDMQLFGPWGEIVSPSLSPATSNAGGCRLFINVAPHARIAIHALATNMGAGTEGANASYILIRDTHSLRTTAFHGQQVLYWESESSQAEMEFSEGFLKAQASLRGQYWTLQSWVPEMQDPQSWKGKEGTSRGPFEQKLISEEDLNMHTGHHHHHH

SEQ ID NO: 77 - protein, 1453 aa, Artificial Sequence
  Human ADAMTS13 protein with a single point mutation P1147V
MHQRHPRARCPPLCVAGILACGFLLGCWGPSHFQQSCLQALEPQAVSSYLSPGAPLKGRPPSPGFQRQRQRQRRAAGGILHLELLVAVGPDVFQAHQEDTERYVLTNLNIGAELLRDPSLGAQFRVHLVKMVILTEPEGAPNITANLTSSLLSVCGWSQTINPEDDTDPGHADLVLYITRFDLELPDGNRQVRGVTQLGGACSPTWSCLITEDTGFDLGVTIAHEIGHSFGLEHDGAPGSGCGPSGHVMASDGAAPRAGLAWSPCSRRQLLSLLSAGRARCVWDPPRPQPGSAGHPPDAQPGLYYSANEQCRVAFGPKAVACTFAREHLDMCQALSCHTDPLDQSSCSRLLVPLLDGTECGVEKWCSKGRCRSLVELTPIAAVHGRWSSWGPRSPCSRSCGGGVVTRRRQCNNPRPAFGGRACVGADLQAEMCNTQACEKTQLEFMSQQCARTDGQPLRSSPGGASFYHWGAAVPHSQGDALCRHMCRAIGESFIMKRGDSFLDGTRCMPSGPREDGTLSLCVSGSCRTFGCDGRMDSQQVWDRCQVCGGDNSTCSPRKGSFTAGRAREYVTFLTVTPNLTSVYIANHRPLFTHLAVRIGGRYVVAGKMSISPNTTYPSLLEDGRVEYRVALTEDRLPRLEEIRIWGPLQEDADIQVYRRYGEEYGNLTRPDITFTYFQPKPRQAWVWAAVRGPCSVSCGAGLRWVNYSCLDQARKELVETVQCQGSQQPPAWPEACVLEPCPPYWAVGDFGPCSASCGGGLRERPVRCVEAQGSLLKTLPPARCRAGAQQPAVALETCNPQPCPARWEVSEPSSCTSAGGAGLALENETCVPGADGLEAPVTEGPGSVDEKLPAPEPCVGMSCPPGWGHLDATSAGEKAPSPWGSIRTGAQAAHVWTPAAGSCSVSCGRGLMELRFLCMDSALRVPVQEELCGLASKPGSRREVCQAVPCPARWQYKLAACSVSCGRGVVRRILYCARAHGEDDGEEILLDTQCQGLPRPEPQEACSLEPCPPRWKVMSLGPCSASCGLGTARRSVACVQLDQGQDVEVDEAACAALVRPEASVPCLIADCTYRWHVGTWMECSVSCGDGIQRRRDTCLGPQAQAPVPADFCQHLPKPVTVRGCWAGPCVGQGTPSLVPHEEAAAVGRTTATPAGASLEWSQARGLLFSPAPQPRRLLPGPQENSVQSSACGRQHLEPTGTIDMRGPGQADCAVAIGRPLGEVVTLRVLESSLNCSAGDMLLLWGRLTWRKMCRKLLDMTFSSKTNTLVVRQRCGRPGGGVLLRYGSQLAPETFYRECDMQLFGPWGEIVSPSLSPATSNAGGCRLFINVAPHARIAIHALATNMGAGTEGANASYILIRDTHSLRTTAFHGQQVLYWESESSQAEMEFSEGFLKAQASLRGQYWTLQSWVPEMQDPQSWKGKEGTSRGPFEQKLISEEDLNMHTGHHHHHH

SEQ ID NO: 78 - protein, 1453 aa, Artificial Sequence
  Human ADAMTS13 protein with a single point mutation P1154V
MHQRHPRARCPPLCVAGILACGFLLGCWGPSHFQQSCLQALEPQAVSSYLSPGAPLKGRPPSPGFQRQRQRQRRAAGGILHLELLVAVGPDVFQAHQEDTERYVLTNLNIGAELLRDPSLGAQFRVHLVKMVILTEPEGAPNITANLTSSLLSVCGWSQTINPEDDTDPGHADLVLYITRFDLELPDGNRQVRGVTQLGGACSPTWSCLITEDTGFDLGVTIAHEIGHSFGLEHDGAPGSGCGPSGHVMASDGAAPRAGLAWSPCSRRQLLSLLSAGRARCVWDPPRPQPGSAGHPPDAQPGLYYSANEQCRVAFGPKAVACTFAREHLDMCQALSCHTDPLDQSSCSRLLVPLLDGTECGVEKWCSKGRCRSLVELTPIAAVHGRWSSWGPRSPCSRSCGGGVVTRRRQCNNPRPAFGGRACVGADLQAEMCNTQACEKTQLEFMSQQCARTDGQPLRSSPGGASFYHWGAAVPHSQGDALCRHMCRAIGESFIMKRGDSFLDGTRCMPSGPREDGTLSLCVSGSCRTFGCDGRMDSQQVWDRCQVCGGDNSTCSPRKGSFTAGRAREYVTFLTVTPNLTSVYIANHRPLFTHLAVRIGGRYVVAGKMSISPNTTYPSLLEDGRVEYRVALTEDRLPRLEEIRIWGPLQEDADIQVYRRYGEEYGNLTRPDITFTYFQPKPRQAWVWAAVRGPCSVSCGAGLRWVNYSCLDQARKELVETVQCQGSQQPPAWPEACVLEPCPPYWAVGDFGPCSASCGGGLRERPVRCVEAQGSLLKTLPPARCRAGAQQPAVALETCNPQPCPARWEVSEPSSCTSAGGAGLALENETCVPGADGLEAPVTEGPGSVDEKLPAPEPCVGMSCPPGWGHLDATSAGEKAPSPWGSIRTGAQAAHVWTPAAGSCSVSCGRGLMELRFLCMDSALRVPVQEELCGLASKPGSRREVCQAVPCPARWQYKLAACSVSCGRGVVRRILYCARAHGEDDGEEILLDTQCQGLPRPEPQEACSLEPCPPRWKVMSLGPCSASCGLGTARRSVACVQLDQGQDVEVDEAACAALVRPEASVPCLIADCTYRWHVGTWMECSVSCGDGIQRRRDTCLGPQAQAPVPADFCQHLPKPVTVRGCWAGPCVGQGTPSLVPHEEAAAPGRTTATVAGASLEWSQARGLLFSPAPQPRRLLPGPQENSVQSSACGRQHLEPTGTIDMRGPGQADCAVAIGRPLGEVVTLRVLESSLNCSAGDMLLLWGRLTWRKMCRKLLDMTFSSKTNTLVVRQRCGRPGGGVLLRYGSQLAPETFYRECDMQLFGPWGEIVSPSLSPATSNAGGCRLFINVAPHARIAIHALATNMGAGTEGANASYILIRDTHSLRTTAFHGQQVLYWESESSQAEMEFSEGFLKAQASLRGQYWTLQSWVPEMQDPQSWKGKEGTSRGPFEQKLISEEDLNMHTGHHHHHH

SEQ ID NO: 79 - protein, 1453 aa, Artificial Sequence
  Human ADAMTS13 protein with a single point mutation P1171V
MHQRHPRARCPPLCVAGILACGFLLGCWGPSHFQQSCLQALEPQAVSSYLSPGAPLKGRPPSPGFQRQRQRQRRAAGGILHLELLVAVGPDVFQAHQEDTERYVLTNLNIGAELLRDPSLGAQFRVHLVKMVILTEPEGAPNITANLTSSLLSVCGWSQTINPEDDTDPGHADLVLYITRFDLELPDGNRQVRGVTQLGGACSPTWSCLITEDTGFDLGVTIAHEIGHSFGLEHDGAPGSGCGPSGHVMASDGAAPRAGLAWSPCSRRQLLSLLSAGRARCVWDPPRPQPGSAGHPPDAQPGLYYSANEQCRVAFGPKAVACTFAREHLDMCQALSCHTDPLDQSSCSRLLVPLLDGTECGVEKWCSKGRCRSLVELTPIAAVHGRWSSWGPRSPCSRSCGGGVVTRRRQCNNPRPAFGGRACVGADLQAEMCNTQACEKTQLEFMSQQCARTDGQPLRSSPGGASFYHWGAAVPHSQGDALCRHMCRAIGESFIMKRGDSFLDGTRCMPSGPREDGTLSLCVSGSCRTFGCDGRMDSQQVWDRCQVCGGDNSTCSPRKGSFTAGRAREYVTFLTVTPNLTSVYIANHRPLFTHLAVRIGGRYVVAGKMSISPNTTYPSLLEDGRVEYRVALTEDRLPRLEEIRIWGPLQEDADIQVYRRYGEEYGNLTRPDITFTYFQPKPRQAWVWAAVRGPCSVSCGAGLRWVNYSCLDQARKELVETVQCQGSQQPPAWPEACVLEPCPPYWAVGDFGPCSASCGGGLRERPVRCVEAQGSLLKTLPPARCRAGAQQPAVALETCNPQPCPARWEVSEPSSCTSAGGAGLALENETCVPGADGLEAPVTEGPGSVDEKLPAPEPCVGMSCPPGWGHLDATSAGEKAPSPWGSIRTGAQAAHVWTPAAGSCSVSCGRGLMELRFLCMDSALRVPVQEELCGLASKPGSRREVCQAVPCPARWQYKLAACSVSCGRGVVRRILYCARAHGEDDGEEILLDTQCQGLPRPEPQEACSLEPCPPRWKVMSLGPCSASCGLGTARRSVACVQLDQGQDVEVDEAACAALVRPEASVPCLIADCTYRWHVGTWMECSVSCGDGIQRRRDTCLGPQAQAPVPADFCQHLPKPVTVRGCWAGPCVGQGTPSLVPHEEAAAPGRTTATPAGASLEWSQARGLLFSVAPQPRRLLPGPQENSVQSSACGRQHLEPTGTIDMRGPGQADCAVAIGRPLGEVVTLRVLESSLNCSAGDMLLLWGRLTWRKMCRKLLDMTFSSKTNTLVVRQRCGRPGGGVLLRYGSQLAPETFYRECDMQLFGPWGEIVSPSLSPATSNAGGCRLFINVAPHARIAIHALATNMGAGTEGANASYILIRDTHSLRTTAFHGQQVLYWESESSQAEMEFSEGFLKAQASLRGQYWTLQSWVPEMQDPQSWKGKEGTSRGPFEQKLISEEDLNMHTGHHHHHH

SEQ ID NO: 80 - protein, 1453 aa, Artificial Sequence
  Human ADAMTS13 protein with a single point mutation P1173V
MHQRHPRARCPPLCVAGILACGFLLGCWGPSHFQQSCLQALEPQAVSSYLSPGAPLKGRPPSPGFQRQRQRQRRAAGGILHLELLVAVGPDVFQAHQEDTERYVLTNLNIGAELLRDPSLGAQFRVHLVKMVILTEPEGAPNITANLTSSLLSVCGWSQTINPEDDTDPGHADLVLYITRFDLELPDGNRQVRGVTQLGGACSPTWSCLITEDTGFDLGVTIAHEIGHSFGLEHDGAPGSGCGPSGHVMASDGAAPRAGLAWSPCSRRQLLSLLSAGRARCVWDPPRPQPGSAGHPPDAQPGLYYSANEQCRVAFGPKAVACTFAREHLDMCQALSCHTDPLDQSSCSRLLVPLLDGTECGVEKWCSKGRCRSLVELTPIAAVHGRWSSWGPRSPCSRSCGGGVVTRRRQCNNPRPAFGGRACVGADLQAEMCNTQACEKTQLEFMSQQCARTDGQPLRSSPGGASFYHWGAAVPHSQGDALCRHMCRAIGESFIMKRGDSFLDGTRCMPSGPREDGTLSLCVSGSCRTFGCDGRMDSQQVWDRCQVCGGDNSTCSPRKGSFTAGRAREYVTFLTVTPNLTSVYIANHRPLFTHLAVRIGGRYVVAGKMSISPNTTYPSLLEDGRVEYRVALTEDRLPRLEEIRIWGPLQEDADIQVYRRYGEEYGNLTRPDITFTYFQPKPRQAWVWAAVRGPCSVSCGAGLRWVNYSCLDQARKELVETVQCQGSQQPPAWPEACVLEPCPPYWAVGDFGPCSASCGGGLRERPVRCVEAQGSLLKTLPPARCRAGAQQPAVALETCNPQPCPARWEVSEPSSCTSAGGAGLALENETCVPGADGLEAPVTEGPGSVDEKLPAPEPCVGMSCPPGWGHLDATSAGEKAPSPWGSIRTGAQAAHVWTPAAGSCSVSCGRGLMELRFLCMDSALRVPVQEELCGLASKPGSRREVCQAVPCPARWQYKLAACSVSCGRGVVRRILYCARAHGEDDGEEILLDTQCQGLPRPEPQEACSLEPCPPRWKVMSLGPCSASCGLGTARRSVACVQLDQGQDVEVDEAACAALVRPEASVPCLIADCTYRWHVGTWMECSVSCGDGIQRRRDTCLGPQAQAPVPADFCQHLPKPVTVRGCWAGPCVGQGTPSLVPHEEAAAPGRTTATPAGASLEWSQARGLLFSPAVQPRRLLPGPQENSVQSSACGRQHLEPTGTIDMRGPGQADCAVAIGRPLGEVVTLRVLESSLNCSAGDMLLLWGRLTWRKMCRKLLDMTFSSKTNTLVVRQRCGRPGGGVLLRYGSQLAPETFYRECDMQLFGPWGEIVSPSLSPATSNAGGCRLFINVAPHARIAIHALATNMGAGTEGANASYILIRDTHSLRTTAFHGQQVLYWESESSQAEMEFSEGFLKAQASLRGQYWTLQSWVPEMQDPQSWKGKEGTSRGPFEQKLISEEDLNMHTGHHHHHH

SEQ ID NO: 81 - protein, 1453 aa, Artificial Sequence
  Human ADAMTS13 protein with a single point mutation P1175V
MHQRHPRARCPPLCVAGILACGFLLGCWGPSHFQQSCLQALEPQAVSSYLSPGAPLKGRPPSPGFQRQRQRQRRAAGGILHLELLVAVGPDVFQAHQEDTERYVLTNLNIGAELLRDPSLGAQFRVHLVKMVILTEPEGAPNITANLTSSLLSVCGWSQTINPEDDTDPGHADLVLYITRFDLELPDGNRQVRGVTQLGGACSPTWSCLITEDTGFDLGVTIAHEIGHSFGLEHDGAPGSGCGPSGHVMASDGAAPRAGLAWSPCSRRQLLSLLSAGRARCVWDPPRPQPGSAGHPPDAQPGLYYSANEQCRVAFGPKAVACTFAREHLDMCQALSCHTDPLDQSSCSRLLVPLLDGTECGVEKWCSKGRCRSLVELTPIAAVHGRWSSWGPRSPCSRSCGGGVVTRRRQCNNPRPAFGGRACVGADLQAEMCNTQACEKTQLEFMSQQCARTDGQPLRSSPGGASFYHWGAAVPHSQGDALCRHMCRAIGESFIMKRGDSFLDGTRCMPSGPREDGTLSLCVSGSCRTFGCDGRMDSQQVWDRCQVCGGDNSTCSPRKGSFTAGRAREYVTFLTVTPNLTSVYIANHRPLFTHLAVRIGGRYVVAGKMSISPNTTYPSLLEDGRVEYRVALTEDRLPRLEEIRIWGPLQEDADIQVYRRYGEEYGNLTRPDITFTYFQPKPRQAWVWAAVRGPCSVSCGAGLRWVNYSCLDQARKELVETVQCQGSQQPPAWPEACVLEPCPPYWAVGDFGPCSASCGGGLRERPVRCVEAQGSLLKTLPPARCRAGAQQPAVALETCNPQPCPARWEVSEPSSCTSAGGAGLALENETCVPGADGLEAPVTEGPGSVDEKLPAPEPCVGMSCPPGWGHLDATSAGEKAPSPWGSIRTGAQAAHVWTPAAGSCSVSCGRGLMELRFLCMDSALRVPVQEELCGLASKPGSRREVCQAVPCPARWQYKLAACSVSCGRGVVRRILYCARAHGEDDGEEILLDTQCQGLPRPEPQEACSLEPCPPRWKVMSLGPCSASCGLGTARRSVACVQLDQGQDVEVDEAACAALVRPEASVPCLIADCTYRWHVGTWMECSVSCGDGIQRRRDTCLGPQAQAPVPADFCQHLPKPVTVRGCWAGPCVGQGTPSLVPHEEAAAPGRTTATPAGASLEWSQARGLLFSPAPQVRRLLPGPQENSVQSSACGRQHLEPTGTIDMRGPGQADCAVAIGRPLGEVVTLRVLESSLNCSAGDMLLLWGRLTWRKMCRKLLDMTFSSKTNTLVVRQRCGRPGGGVLLRYGSQLAPETFYRECDMQLFGPWGEIVSPSLSPATSNAGGCRLFINVAPHARIAIHALATNMGAGTEGANASYILIRDTHSLRTTAFHGQQVLYWESESSQAEMEFSEGFLKAQASLRGQYWTLQSWVPEMQDPQSWKGKEGTSRGPFEQKLISEEDLNMHTGHHHHHH

SEQ ID NO: 82 - protein, 1453 aa, Artificial Sequence
  Human ADAMTS13 protein with a single point mutation P1180V
MHQRHPRARCPPLCVAGILACGFLLGCWGPSHFQQSCLQALEPQAVSSYLSPGAPLKGRPPSPGFQRQRQRQRRAAGGILHLELLVAVGPDVFQAHQEDTERYVLTNLNIGAELLRDPSLGAQFRVHLVKMVILTEPEGAPNITANLTSSLLSVCGWSQTINPEDDTDPGHADLVLYITRFDLELPDGNRQVRGVTQLGGACSPTWSCLITEDTGFDLGVTIAHEIGHSFGLEHDGAPGSGCGPSGHVMASDGAAPRAGLAWSPCSRRQLLSLLSAGRARCVWDPPRPQPGSAGHPPDAQPGLYYSANEQCRVAFGPKAVACTFAREHLDMCQALSCHTDPLDQSSCSRLLVPLLDGTECGVEKWCSKGRCRSLVELTPIAAVHGRWSSWGPRSPCSRSCGGGVVTRRRQCNNPRPAFGGRACVGADLQAEMCNTQACEKTQLEFMSQQCARTDGQPLRSSPGGASFYHWGAAVPHSQGDALCRHMCRAIGESFIMKRGDSFLDGTRCMPSGPREDGTLSLCVSGSCRTFGCDGRMDSQQVWDRCQVCGGDNSTCSPRKGSFTAGRAREYVTFLTVTPNLTSVYIANHRPLFTHLAVRIGGRYVVAGKMSISPNTTYPSLLEDGRVEYRVALTEDRLPRLEEIRIWGPLQEDADIQVYRRYGEEYGNLTRPDITFTYFQPKPRQAWVWAAVRGPCSVSCGAGLRWVNYSCLDQARKELVETVQCQGSQQPPAWPEACVLEPCPPYWAVGDFGPCSASCGGGLRERPVRCVEAQGSLLKTLPPARCRAGAQQPAVALETCNPQPCPARWEVSEPSSCTSAGGAGLALENETCVPGADGLEAPVTEGPGSVDEKLPAPEPCVGMSCPPGWGHLDATSAGEKAPSPWGSIRTGAQAAHVWTPAAGSCSVSCGRGLMELRFLCMDSALRVPVQEELCGLASKPGSRREVCQAVPCPARWQYKLAACSVSCGRGVVRRILYCARAHGEDDGEEILLDTQCQGLPRPEPQEACSLEPCPPRWKVMSLGPCSASCGLGTARRSVACVQLDQGQDVEVDEAACAALVRPEASVPCLIADCTYRWHVGTWMECSVSCGDGIQRRRDTCLGPQAQAPVPADFCQHLPKPVTVRGCWAGPCVGQGTPSLVPHEEAAAPGRTTATPAGASLEWSQARGLLFSPAPQPRRLLVGPQENSVQSSACGRQHLEPTGTIDMRGPGQADCAVAIGRPLGEVVTLRVLESSLNCSAGDMLLLWGRLTWRKMCRKLLDMTFSSKTNTLVVRQRCGRPGGGVLLRYGSQLAPETFYRECDMQLFGPWGEIVSPSLSPATSNAGGCRLFINVAPHARIAIHALATNMGAGTEGANASYILIRDTHSLRTTAFHGQQVLYWESESSQAEMEFSEGFLKAQASLRGQYWTLQSWVPEMQDPQSWKGKEGTSRGPFEQKLISEEDLNMHTGHHHHHH

SEQ ID NO: 83 - protein, 1453 aa, Artificial Sequence
  Human ADAMTS13 protein with a single point mutation P1182V
MHQRHPRARCPPLCVAGILACGFLLGCWGPSHFQQSCLQALEPQAVSSYLSPGAPLKGRPPSPGFQRQRQRQRRAAGGILHLELLVAVGPDVFQAHQEDTERYVLTNLNIGAELLRDPSLGAQFRVHLVKMVILTEPEGAPNITANLTSSLLSVCGWSQTINPEDDTDPGHADLVLYITRFDLELPDGNRQVRGVTQLGGACSPTWSCLITEDTGFDLGVTIAHEIGHSFGLEHDGAPGSGCGPSGHVMASDGAAPRAGLAWSPCSRRQLLSLLSAGRARCVWDPPRPQPGSAGHPPDAQPGLYYSANEQCRVAFGPKAVACTFAREHLDMCQALSCHTDPLDQSSCSRLLVPLLDGTECGVEKWCSKGRCRSLVELTPIAAVHGRWSSWGPRSPCSRSCGGGVVTRRRQCNNPRPAFGGRACVGADLQAEMCNTQACEKTQLEFMSQQCARTDGQPLRSSPGGASFYHWGAAVPHSQGDALCRHMCRAIGESFIMKRGDSFLDGTRCMPSGPREDGTLSLCVSGSCRTFGCDGRMDSQQVWDRCQVCGGDNSTCSPRKGSFTAGRAREYVTFLTVTPNLTSVYIANHRPLFTHLAVRIGGRYVVAGKMSISPNTTYPSLLEDGRVEYRVALTEDRLPRLEEIRIWGPLQEDADIQVYRRYGEEYGNLTRPDITFTYFQPKPRQAWVWAAVRGPCSVSCGAGLRWVNYSCLDQARKELVETVQCQGSQQPPAWPEACVLEPCPPYWAVGDFGPCSASCGGGLRERPVRCVEAQGSLLKTLPPARCRAGAQQPAVALETCNPQPCPARWEVSEPSSCTSAGGAGLALENETCVPGADGLEAPVTEGPGSVDEKLPAPEPCVGMSCPPGWGHLDATSAGEKAPSPWGSIRTGAQAAHVWTPAAGSCSVSCGRGLMELRFLCMDSALRVPVQEELCGLASKPGSRREVCQAVPCPARWQYKLAACSVSCGRGVVRRILYCARAHGEDDGEEILLDTQCQGLPRPEPQEACSLEPCPPRWKVMSLGPCSASCGLGTARRSVACVQLDQGQDVEVDEAACAALVRPEASVPCLIADCTYRWHVGTWMECSVSCGDGIQRRRDTCLGPQAQAPVPADFCQHLPKPVTVRGCWAGPCVGQGTPSLVPHEEAAAPGRTTATPAGASLEWSQARGLLFSPAPQPRRLLPGVQENSVQSSACGRQHLEPTGTIDMRGPGQADCAVAIGRPLGEVVTLRVLESSLNCSAGDMLLLWGRLTWRKMCRKLLDMTFSSKTNTLVVRQRCGRPGGGVLLRYGSQLAPETFYRECDMQLFGPWGEIVSPSLSPATSNAGGCRLFINVAPHARIAIHALATNMGAGTEGANASYILIRDTHSLRTTAFHGQQVLYWESESSQAEMEFSEGFLKAQASLRGQYWTLQSWVPEMQDPQSWKGKEGTSRGPFEQKLISEEDLNMHTGHHHHHH

SEQ ID NO: 84 - DNA, 4359 bp, Homo sapiens
atgcaccagcgtcacccccgggcaagatgccctcccctctgtgtggccggaatccttgcctgtggctttctcctgggctgctggggaccctcccatttccagcagagctgtcttcaggctttggagccacaggccgtgtcttcttacttgagccctggtgctcccttaaaaggccgccctccttcccctggcttccagaggcagaggcagaggcagaggcgggctgcaggcggcatcctacacctggagctgctggtggccgtgggccccgatgtcttccaggctcaccaggaggacacagagcgctatgtgctcaccaacctcaacatcggggcagaactgcttcgggacccgtccctgggggctcagtttcgggtgcacctggtgaagatggtcattctgacagagcctgagggtgctccaaatatcacagccaacctcacctcgtccctgctgagcgtctgtgggtggagccagaccatcaaccctgaggacgacacggatcctggccatgctgacctggtcctctatatcactaggtttgacctggagttgcctgatggtaaccggcaggtgcggggcgtcacccagctgggcggtgcctgctccccaacctggagctgcctcattaccgaggacactggcttcgacctgggagtcaccattgcccatgagattgggcacagcttcggcctggagcacgacggcgcgcccggcagcggctgcggccccagcggacacgtgatggcttcggacggcgccgcgccccgcgccggcctcgcctggtccccctgcagccgccggcagctgctgagcctgctcagcgcaggacgggcgcgctgcgtgtgggacccgccgcggcctcaacccgggtccgcggggcacccgccggatgcgcagcctggcctctactacagcgccaacgagcagtgccgcgtggccttcggccccaaggctgtcgcctgcaccttcgccagggagcacctggatatgtgccaggccctctcctgccacacagacccgctggaccaaagcagctgcagccgcctcctcgttcctctcctggatgggacagaatgtggcgtggagaagtggtgctccaaaggtcgctgccgctccctggtggagctgacccccatagcagcagtgcatgggcgctggtctagctggggtccccgaagtccttgctcccgctcctgcggaggaggtgtggtcaccaggaggcggcagtgcaacaaccccagacctgcctttggggggcgtgcatgtgttggtgctgacctccaggccgagatgtgcaacactcaggcctgcgagaagacccagctggagttcatgtcgcaacagtgcgccaggaccgacggccagccgctgcgctcctcccctggcggcgcctccttctaccactggggtgctgctgtaccacacagccaaggggatgctctgtgcagacacatgtgccgggccattggcgagagcttcatcatgaagcgtggagacagcttcctcgatgggacccggtgtatgccaagtggcccccgggaggacgggaccctgagcctgtgtgtgtcgggcagctgcaggacatttggctgtgatggtaggatggactcccagcaggtatgggacaggtgccaggtgtgtggtggggacaacagcacgtgcagcccacggaagggctctttcacagctggcagagcgagagaatatgtcacgtttctgacagttacccccaacctgaccagtgtctacattgccaaccacaggcctctcttcacacacttggcggtgaggatcggagggcgctatgtcgtggctgggaagatgagcatctcccctaacaccacctacccctccctcctggaggatggtcgtgtcgagtacagagtggccctcaccgaggaccggctgccccgcctggaggagatccgcatctggggacccctccaggaagatgctgacatccaggtttacaggcggtatggcgaggagtatggcaacctcacccgcccagacatcaccttcacctacttccagcctaagccacggcaggcctgggtgtgggccgctgtgcgtgggccctgctcggtgagctgtggggcagggctgcgctgggtaaactacagctgcctggaccaggccaggaaggagttggtggagactgtccagtgccaagggagccagcagccaccagcgtggccagaggcctgcgtgctcgaaccctgccctccctactgggcggtgggagacttcggcccatgcagcgcctcctgtgggggtggcctgcgggagcggccagtgcgctgcgtggaggcccagggcagcctcctgaagacattgcccccagcccggtgcagagcaggggcccagcagccagctgtggcgctggaaacctgcaacccccagccctgccctgccaggtgggaggtgtcagagcccagctcatgcacatcagctggtggagcaggcctggccttggagaacgagacctgtgtgccaggggcagatggcctggaggctccagtgactgaggggcctggctccgtagatgagaagctgcctgcccctgagccctgtgtcgggatgtcatgtcctccaggctggggccatctggatgccacctctgcaggggagaaggctccctccccatggggcagcatcaggacgggggctcaagctgcacacgtgtggacccctgcggcagggtcgtgctccgtctcctgcgggcgaggtctgatggagctccgtttcctgtgcatggactctgccctcagggtgcctgtccaggaagagctgtgtggcctggcaagcaagcctgggagccggcgggaggtctgccaggctgtcccgtgccctgctcggtggcagtacaagctggcggcctgcagcgtgagctgtgggagaggggtcgtgcggaggatcctgtattgtgcccgggcccatggggaggacgatggtgaggagatcctgttggacacccagtgccaggggctgcctcgcccggaaccccaggaggcctgcagcctggagccctgcccacctaggtggaaagtcatgtcccttggcccatgttcggccagctgtggccttggcactgctagacgctcggtggcctgtgtgcagctcgaccaaggccaggacgtggaggtggacgaggcggcctgtgcggcgctggtgcggcccgaggccagtgtcccctgtctcattgccgactgcacctaccgctggcatgttggcacctggatggagtgctctgtttcctgtggggatggcatccagcgccggcgtgacacctgcctcggaccccaggcccaggcgcctgtgccagctgatttctgccagcacttgcccaagccggtgactgtgcgtggctgctgggctgggccctgtgtgggacagggtacgcccagcctggtgccccacgaagaagccgctgctccaggacggaccacagccacccctgctggtgcctccctggagtggtcccaggcccggggcctgctcttctccccggctccccagcctcggcggctcctgcccgggccccaggaaaactcagtgcagtccagtgcctgtggcaggcagcaccttgagccaacaggaaccattgacatgcgaggcccagggcaggcagactgtgcagtggccattgggcggcccctcggggaggtggtgaccctccgcgtccttgagagttctctcaactgcagtgcgggggacatgttgctgctttggggccggctcacctggaggaagatgtgcaggaagctgttggacatgactttcagctccaagaccaacacgctggtggtgaggcagcgctgcgggcggccaggaggtggggtgctgctgcggtatgggagccagcttgctcctgaaaccttctacagagaatgtgacatgcagctctttgggccctggggtgaaatcgtgagcccctcgctgagtccagccacgagtaatgcagggggctgccggctcttcattaatgtggctccgcacgcacggattgccatccatgccctggccaccaacatgggcgctgggaccgagggagccaatgccagctacatcttgatccgggacacccacagcttgaggaccacagcgttccatgggcagcaggtgctctactgggagtcagagagcagccaggctgagatggagttcagcgagggcttcctgaaggctcaggccagcctgcggggccagtactggaccctccaatcatgggtaccggagatgcaggaccctcagtcctggaagggaaaggaaggaacctctagagggcccttcgaacaaaaactcatctcagaagaggatctgaatatgcataccggtcatcatcaccatcaccat

SEQ ID NO: 85 - DNA, 4359 bp, Artificial Sequence
  Nucleotide sequence corresponding to Human ADAMTS13 protein with point mutations R568K/F592Y/R660K/Y661F/Y665F
atgcaccagcgtcacccccgggcaagatgccctcccctctgtgtggccggaatccttgcctgtggctttctcctgggctgctggggaccctcccatttccagcagagctgtcttcaggctttggagccacaggccgtgtcttcttacttgagccctggtgctcccttaaaaggccgccctccttcccctggcttccagaggcagaggcagaggcagaggcgggctgcaggcggcatcctacacctggagctgctggtggccgtgggccccgatgtcttccaggctcaccaggaggacacagagcgctatgtgctcaccaacctcaacatcggggcagaactgcttcgggacccgtccctgggggctcagtttcgggtgcacctggtgaagatggtcattctgacagagcctgagggtgctccaaatatcacagccaacctcacctcgtccctgctgagcgtctgtgggtggagccagaccatcaaccctgaggacgacacggatcctggccatgctgacctggtcctctatatcactaggtttgacctggagttgcctgatggtaaccggcaggtgcggggcgtcacccagctgggcggtgcctgctccccaacctggagctgcctcattaccgaggacactggcttcgacctgggagtcaccattgcccatgagattgggcacagcttcggcctggagcacgacggcgcgcccggcagcggctgcggccccagcggacacgtgatggcttcggacggcgccgcgccccgcgccggcctcgcctggtccccctgcagccgccggcagctgctgagcctgctcagcgcaggacgggcgcgctgcgtgtgggacccgccgcggcctcaacccgggtccgcggggcacccgccggatgcgcagcctggcctctactacagcgccaacgagcagtgccgcgtggccttcggccccaaggctgtcgcctgcaccttcgccagggagcacctggatatgtgccaggccctctcctgccacacagacccgctggaccaaagcagctgcagccgcctcctcgttcctctcctggatgggacagaatgtggcgtggagaagtggtgctccaaaggtcgctgccgctccctggtggagctgacccccatagcagcagtgcatgggcgctggtctagctggggtccccgaagtccttgctcccgctcctgcggaggaggtgtggtcaccaggaggcggcagtgcaacaaccccagacctgcctttggggggcgtgcatgtgttggtgctgacctccaggccgagatgtgcaacactcaggcctgcgagaagacccagctggagttcatgtcgcaacagtgcgccaggaccgacggccagccgctgcgctcctcccctggcggcgcctccttctaccactggggtgctgctgtaccacacagccaaggggatgctctgtgcagacacatgtgccgggccattggcgagagcttcatcatgaagcgtggagacagcttcctcgatgggacccggtgtatgccaagtggcccccgggaggacgggaccctgagcctgtgtgtgtcgggcagctgcaggacatttggctgtgatggtaggatggactcccagcaggtatgggacaggtgccaggtgtgtggtggggacaacagcacgtgcagcccacggaagggctctttcacagctggcagagcgaaggaatatgtcacgtttctgacagttacccccaacctgaccagtgtctacattgccaaccacaggcctctctacacacacttggcggtgaggatcggagggcgctatgtcgtggctgggaagatgagcatctcccctaacaccacctacccctccctcctggaggatggtcgtgtcgagtacagagtggccctcaccgaggaccggctgccccgcctggaggagatccgcatctggggacccctccaggaagatgctgacatccaggtttacaggaagtttggcgaggagtttggcaacctcacccgcccagacatcaccttcacctacttccagcctaagccacggcaggcctgggtgtgggccgctgtgcgtgggccctgctcggtgagctgtggggcagggctgcgctgggtaaactacagctgcctggaccaggccaggaaggagttggtggagactgtccagtgccaagggagccagcagccaccagcgtggccagaggcctgcgtgctcgaaccctgccctccctactgggcggtgggagacttcggcccatgcagcgcctcctgtgggggtggcctgcgggagcggccagtgcgctgcgtggaggcccagggcagcctcctgaagacattgcccccagcccggtgcagagcaggggcccagcagccagctgtggcgctggaaacctgcaacccccagccctgccctgccaggtgggaggtgtcagagcccagctcatgcacatcagctggtggagcaggcctggccttggagaacgagacctgtgtgccaggggcagatggcctggaggctccagtgactgaggggcctggctccgtagatgagaagctgcctgcccctgagccctgtgtcgggatgtcatgtcctccaggctggggccatctggatgccacctctgcaggggagaaggctccctccccatggggcagcatcaggacgggggctcaagctgcacacgtgtggacccctgcggcagggtcgtgctccgtctcctgcgggcgaggtctgatggagctccgtttcctgtgcatggactctgccctcagggtgcctgtccaggaagagctgtgtggcctggcaagcaagcctgggagccggcgggaggtctgccaggctgtcccgtgccctgctcggtggcagtacaagctggcggcctgcagcgtgagctgtgggagaggggtcgtgcggaggatcctgtattgtgcccgggcccatggggaggacgatggtgaggagatcctgttggacacccagtgccaggggctgcctcgcccggaaccccaggaggcctgcagcctggagccctgcccacctaggtggaaagtcatgtcccttggcccatgttcggccagctgtggccttggcactgctagacgctcggtggcctgtgtgcagctcgaccaaggccaggacgtggaggtggacgaggcggcctgtgcggcgctggtgcggcccgaggccagtgtcccctgtctcattgccgactgcacctaccgctggcatgttggcacctggatggagtgctctgtttcctgtggggatggcatccagcgccggcgtgacacctgcctcggaccccaggcccaggcgcctgtgccagctgatttctgccagcacttgcccaagccggtgactgtgcgtggctgctgggctgggccctgtgtgggacagggtacgcccagcctggtgccccacgaagaagccgctgctccaggacggaccacagccacccctgctggtgcctccctggagtggtcccaggcccggggcctgctcttctccccggctccccagcctcggcggctcctgcccgggccccaggaaaactcagtgcagtccagtgcctgtggcaggcagcaccttgagccaacaggaaccattgacatgcgaggcccagggcaggcagactgtgcagtggccattgggcggcccctcggggaggtggtgaccctccgcgtccttgagagttctctcaactgcagtgcgggggacatgttgctgctttggggccggctcacctggaggaagatgtgcaggaagctgttggacatgactttcagctccaagaccaacacgctggtggtgaggcagcgctgcgggcggccaggaggtggggtgctgctgcggtatgggagccagcttgctcctgaaaccttctacagagaatgtgacatgcagctctttgggccctggggtgaaatcgtgagcccctcgctgagtccagccacgagtaatgcagggggctgccggctcttcattaatgtggctccgcacgcacggattgccatccatgccctggccaccaacatgggcgctgggaccgagggagccaatgccagctacatcttgatccgggacacccacagcttgaggaccacagcgttccatgggcagcaggtgctctactgggagtcagagagcagccaggctgagatggagttcagcgagggcttcctgaaggctcaggccagcctgcggggccagtactggaccctccaatcatgggtaccggagatgcaggaccctcagtcctggaagggaaaggaaggaacctctagagggcccttcgaacaaaaactcatctcagaagaggatctgaatatgcataccggtcatcatcaccatcaccat

SEQ ID NO: 86 - DNA, 4359 bp, Artificial Sequence
  Nucleotide sequence corresponding to Human ADAMTS13 protein with a single point mutation A1144V
atgcaccagcgtcacccccgggcaagatgccctcccctctgtgtggccggaatccttgcctgtggctttctcctgggctgctggggaccctcccatttccagcagagctgtcttcaggctttggagccacaggccgtgtcttcttacttgagccctggtgctcccttaaaaggccgccctccttcccctggcttccagaggcagaggcagaggcagaggcgggctgcaggcggcatcctacacctggagctgctggtggccgtgggccccgatgtcttccaggctcaccaggaggacacagagcgctatgtgctcaccaacctcaacatcggggcagaactgcttcgggacccgtccctgggggctcagtttcgggtgcacctggtgaagatggtcattctgacagagcctgagggtgctccaaatatcacagccaacctcacctcgtccctgctgagcgtctgtgggtggagccagaccatcaaccctgaggacgacacggatcctggccatgctgacctggtcctctatatcactaggtttgacctggagttgcctgatggtaaccggcaggtgcggggcgtcacccagctgggcggtgcctgctccccaacctggagctgcctcattaccgaggacactggcttcgacctgggagtcaccattgcccatgagattgggcacagcttcggcctggagcacgacggcgcgcccggcagcggctgcggccccagcggacacgtgatggcttcggacggcgccgcgccccgcgccggcctcgcctggtccccctgcagccgccggcagctgctgagcctgctcagcgcaggacgggcgcgctgcgtgtgggacccgccgcggcctcaacccgggtccgcggggcacccgccggatgcgcagcctggcctctactacagcgccaacgagcagtgccgcgtggccttcggccccaaggctgtcgcctgcaccttcgccagggagcacctggatatgtgccaggccctctcctgccacacagacccgctggaccaaagcagctgcagccgcctcctcgttcctctcctggatgggacagaatgtggcgtggagaagtggtgctccaaaggtcgctgccgctccctggtggagctgacccccatagcagcagtgcatgggcgctggtctagctggggtccccgaagtccttgctcccgctcctgcggaggaggtgtggtcaccaggaggcggcagtgcaacaaccccagacctgcctttggggggcgtgcatgtgttggtgctgacctccaggccgagatgtgcaacactcaggcctgcgagaagacccagctggagttcatgtcgcaacagtgcgccaggaccgacggccagccgctgcgctcctcccctggcggcgcctccttctaccactggggtgctgctgtaccacacagccaaggggatgctctgtgcagacacatgtgccgggccattggcgagagcttcatcatgaagcgtggagacagcttcctcgatgggacccggtgtatgccaagtggcccccgggaggacgggaccctgagcctgtgtgtgtcgggcagctgcaggacatttggctgtgatggtaggatggactcccagcaggtatgggacaggtgccaggtgtgtggtggggacaacagcacgtgcagcccacggaagggctctttcacagctggcagagcgagagaatatgtcacgtttctgacagttacccccaacctgaccagtgtctacattgccaaccacaggcctctcttcacacacttggcggtgaggatcggagggcgctatgtcgtggctgggaagatgagcatctcccctaacaccacctacccctccctcctggaggatggtcgtgtcgagtacagagtggccctcaccgaggaccggctgccccgcctggaggagatccgcatctggggacccctccaggaagatgctgacatccaggtttacaggcggtatggcgaggagtatggcaacctcacccgcccagacatcaccttcacctacttccagcctaagccacggcaggcctgggtgtgggccgctgtgcgtgggccctgctcggtgagctgtggggcagggctgcgctgggtaaactacagctgcctggaccaggccaggaaggagttggtggagactgtccagtgccaagggagccagcagccaccagcgtggccagaggcctgcgtgctcgaaccctgccctccctactgggcggtgggagacttcggcccatgcagcgcctcctgtgggggtggcctgcgggagcggccagtgcgctgcgtggaggcccagggcagcctcctgaagacattgcccccagcccggtgcagagcaggggcccagcagccagctgtggcgctggaaacctgcaacccccagccctgccctgccaggtgggaggtgtcagagcccagctcatgcacatcagctggtggagcaggcctggccttggagaacgagacctgtgtgccaggggcagatggcctggaggctccagtgactgaggggcctggctccgtagatgagaagctgcctgcccctgagccctgtgtcgggatgtcatgtcctccaggctggggccatctggatgccacctctgcaggggagaaggctccctccccatggggcagcatcaggacgggggctcaagctgcacacgtgtggacccctgcggcagggtcgtgctccgtctcctgcgggcgaggtctgatggagctccgtttcctgtgcatggactctgccctcagggtgcctgtccaggaagagctgtgtggcctggcaagcaagcctgggagccggcgggaggtctgccaggctgtcccgtgccctgctcggtggcagtacaagctggcggcctgcagcgtgagctgtgggagaggggtcgtgcggaggatcctgtattgtgcccgggcccatggggaggacgatggtgaggagatcctgttggacacccagtgccaggggctgcctcgcccggaaccccaggaggcctgcagcctggagccctgcccacctaggtggaaagtcatgtcccttggcccatgttcggccagctgtggccttggcactgctagacgctcggtggcctgtgtgcagctcgaccaaggccaggacgtggaggtggacgaggcggcctgtgcggcgctggtgcggcccgaggccagtgtcccctgtctcattgccgactgcacctaccgctggcatgttggcacctggatggagtgctctgtttcctgtggggatggcatccagcgccggcgtgacacctgcctcggaccccaggcccaggcgcctgtgccagctgatttctgccagcacttgcccaagccggtgactgtgcgtggctgctgggctgggccctgtgtgggacagggtacgcccagcctggtgccccacgaagaagtggctgctccaggacggaccacagccacccctgctggtgcctccctggagtggtcccaggcccggggcctgctcttctccccggctccccagcctcggcggctcctgcccgggccccaggaaaactcagtgcagtccagtgcctgtggcaggcagcaccttgagccaacaggaaccattgacatgcgaggcccagggcaggcagactgtgcagtggccattgggcggcccctcggggaggtggtgaccctccgcgtccttgagagttctctcaactgcagtgcgggggacatgttgctgctttggggccggctcacctggaggaagatgtgcaggaagctgttggacatgactttcagctccaagaccaacacgctggtggtgaggcagcgctgcgggcggccaggaggtggggtgctgctgcggtatgggagccagcttgctcctgaaaccttctacagagaatgtgacatgcagctctttgggccctggggtgaaatcgtgagcccctcgctgagtccagccacgagtaatgcagggggctgccggctcttcattaatgtggctccgcacgcacggattgccatccatgccctggccaccaacatgggcgctgggaccgagggagccaatgccagctacatcttgatccgggacacccacagcttgaggaccacagcgttccatgggcagcaggtgctctactgggagtcagagagcagccaggctgagatggagttcagcgagggcttcctgaaggctcaggccagcctgcggggccagtactggaccctccaatcatgggtaccggagatgcaggaccctcagtcctggaagggaaaggaaggaacctctagagggcccttcgaacaaaaactcatctcagaagaggatctgaatatgcataccggtcatcatcaccatcaccat

SEQ ID NO: 87 - DNA, 4359 bp, Artificial Sequence
  Nucleotide sequence corresponding to Human ADAMTS13 protein with a single point mutation A1145V
atgcaccagcgtcacccccgggcaagatgccctcccctctgtgtggccggaatccttgcctgtggctttctcctgggctgctggggaccctcccatttccagcagagctgtcttcaggctttggagccacaggccgtgtcttcttacttgagccctggtgctcccttaaaaggccgccctccttcccctggcttccagaggcagaggcagaggcagaggcgggctgcaggcggcatcctacacctggagctgctggtggccgtgggccccgatgtcttccaggctcaccaggaggacacagagcgctatgtgctcaccaacctcaacatcggggcagaactgcttcgggacccgtccctgggggctcagtttcgggtgcacctggtgaagatggtcattctgacagagcctgagggtgctccaaatatcacagccaacctcacctcgtccctgctgagcgtctgtgggtggagccagaccatcaaccctgaggacgacacggatcctggccatgctgacctggtcctctatatcactaggtttgacctggagttgcctgatggtaaccggcaggtgcggggcgtcacccagctgggcggtgcctgctccccaacctggagctgcctcattaccgaggacactggcttcgacctgggagtcaccattgcccatgagattgggcacagcttcggcctggagcacgacggcgcgcccggcagcggctgcggccccagcggacacgtgatggcttcggacggcgccgcgccccgcgccggcctcgcctggtccccctgcagccgccggcagctgctgagcctgctcagcgcaggacgggcgcgctgcgtgtgggacccgccgcggcctcaacccgggtccgcggggcacccgccggatgcgcagcctggcctctactacagcgccaacgagcagtgccgcgtggccttcggccccaaggctgtcgcctgcaccttcgccagggagcacctggatatgtgccaggccctctcctgccacacagacccgctggaccaaagcagctgcagccgcctcctcgttcctctcctggatgggacagaatgtggcgtggagaagtggtgctccaaaggtcgctgccgctccctggtggagctgacccccatagcagcagtgcatgggcgctggtctagctggggtccccgaagtccttgctcccgctcctgcggaggaggtgtggtcaccaggaggcggcagtgcaacaaccccagacctgcctttggggggcgtgcatgtgttggtgctgacctccaggccgagatgtgcaacactcaggcctgcgagaagacccagctggagttcatgtcgcaacagtgcgccaggaccgacggccagccgctgcgctcctcccctggcggcgcctccttctaccactggggtgctgctgtaccacacagccaaggggatgctctgtgcagacacatgtgccgggccattggcgagagcttcatcatgaagcgtggagacagcttcctcgatgggacccggtgtatgccaagtggcccccgggaggacgggaccctgagcctgtgtgtgtcgggcagctgcaggacatttggctgtgatggtaggatggactcccagcaggtatgggacaggtgccaggtgtgtggtggggacaacagcacgtgcagcccacggaagggctctttcacagctggcagagcgagagaatatgtcacgtttctgacagttacccccaacctgaccagtgtctacattgccaaccacaggcctctcttcacacacttggcggtgaggatcggagggcgctatgtcgtggctgggaagatgagcatctcccctaacaccacctacccctccctcctggaggatggtcgtgtcgagtacagagtggccctcaccgaggaccggctgccccgcctggaggagatccgcatctggggacccctccaggaagatgctgacatccaggtttacaggcggtatggcgaggagtatggcaacctcacccgcccagacatcaccttcacctacttccagcctaagccacggcaggcctgggtgtgggccgctgtgcgtgggccctgctcggtgagctgtggggcagggctgcgctgggtaaactacagctgcctggaccaggccaggaaggagttggtggagactgtccagtgccaagggagccagcagccaccagcgtggccagaggcctgcgtgctcgaaccctgccctccctactgggcggtgggagacttcggcccatgcagcgcctcctgtgggggtggcctgcgggagcggccagtgcgctgcgtggaggcccagggcagcctcctgaagacattgcccccagcccggtgcagagcaggggcccagcagccagctgtggcgctggaaacctgcaacccccagccctgccctgccaggtgggaggtgtcagagcccagctcatgcacatcagctggtggagcaggcctggccttggagaacgagacctgtgtgccaggggcagatggcctggaggctccagtgactgaggggcctggctccgtagatgagaagctgcctgcccctgagccctgtgtcgggatgtcatgtcctccaggctggggccatctggatgccacctctgcaggggagaaggctccctccccatggggcagcatcaggacgggggctcaagctgcacacgtgtggacccctgcggcagggtcgtgctccgtctcctgcgggcgaggtctgatggagctccgtttcctgtgcatggactctgccctcagggtgcctgtccaggaagagctgtgtggcctggcaagcaagcctgggagccggcgggaggtctgccaggctgtcccgtgccctgctcggtggcagtacaagctggcggcctgcagcgtgagctgtgggagaggggtcgtgcggaggatcctgtattgtgcccgggcccatggggaggacgatggtgaggagatcctgttggacacccagtgccaggggctgcctcgcccggaaccccaggaggcctgcagcctggagccctgcccacctaggtggaaagtcatgtcccttggcccatgttcggccagctgtggccttggcactgctagacgctcggtggcctgtgtgcagctcgaccaaggccaggacgtggaggtggacgaggcggcctgtgcggcgctggtgcggcccgaggccagtgtcccctgtctcattgccgactgcacctaccgctggcatgttggcacctggatggagtgctctgtttcctgtggggatggcatccagcgccggcgtgacacctgcctcggaccccaggcccaggcgcctgtgccagctgatttctgccagcacttgcccaagccggtgactgtgcgtggctgctgggctgggccctgtgtgggacagggtacgcccagcctggtgccccacgaagaagccgtggctccaggacggaccacagccacccctgctggtgcctccctggagtggtcccaggcccggggcctgctcttctccccggctccccagcctcggcggctcctgcccgggccccaggaaaactcagtgcagtccagtgcctgtggcaggcagcaccttgagccaacaggaaccattgacatgcgaggcccagggcaggcagactgtgcagtggccattgggcggcccctcggggaggtggtgaccctccgcgtccttgagagttctctcaactgcagtgcgggggacatgttgctgctttggggccggctcacctggaggaagatgtgcaggaagctgttggacatgactttcagctccaagaccaacacgctggtggtgaggcagcgctgcgggcggccaggaggtggggtgctgctgcggtatgggagccagcttgctcctgaaaccttctacagagaatgtgacatgcagctctttgggccctggggtgaaatcgtgagcccctcgctgagtccagccacgagtaatgcagggggctgccggctcttcattaatgtggctccgcacgcacggattgccatccatgccctggccaccaacatgggcgctgggaccgagggagccaatgccagctacatcttgatccgggacacccacagcttgaggaccacagcgttccatgggcagcaggtgctctactgggagtcagagagcagccaggctgagatggagttcagcgagggcttcctgaaggctcaggccagcctgcggggccagtactggaccctccaatcatgggtaccggagatgcaggaccctcagtcctggaagggaaaggaaggaacctctagagggcccttcgaacaaaaactcatctcagaagaggatctgaatatgcataccggtcatcatcaccatcaccat

SEQ ID NO: 88 - DNA, 4359 bp, Artificial Sequence
  Nucleotide sequence corresponding to Human ADAMTS13 protein with a single point mutation A1146V
atgcaccagcgtcacccccgggcaagatgccctcccctctgtgtggccggaatccttgcctgtggctttctcctgggctgctggggaccctcccatttccagcagagctgtcttcaggctttggagccacaggccgtgtcttcttacttgagccctggtgctcccttaaaaggccgccctccttcccctggcttccagaggcagaggcagaggcagaggcgggctgcaggcggcatcctacacctggagctgctggtggccgtgggccccgatgtcttccaggctcaccaggaggacacagagcgctatgtgctcaccaacctcaacatcggggcagaactgcttcgggacccgtccctgggggctcagtttcgggtgcacctggtgaagatggtcattctgacagagcctgagggtgctccaaatatcacagccaacctcacctcgtccctgctgagcgtctgtgggtggagccagaccatcaaccctgaggacgacacggatcctggccatgctgacctggtcctctatatcactaggtttgacctggagttgcctgatggtaaccggcaggtgcggggcgtcacccagctgggcggtgcctgctccccaacctggagctgcctcattaccgaggacactggcttcgacctgggagtcaccattgcccatgagattgggcacagcttcggcctggagcacgacggcgcgcccggcagcggctgcggccccagcggacacgtgatggcttcggacggcgccgcgccccgcgccggcctcgcctggtccccctgcagccgccggcagctgctgagcctgctcagcgcaggacgggcgcgctgcgtgtgggacccgccgcggcctcaacccgggtccgcggggcacccgccggatgcgcagcctggcctctactacagcgccaacgagcagtgccgcgtggccttcggccccaaggctgtcgcctgcaccttcgccagggagcacctggatatgtgccaggccctctcctgccacacagacccgctggaccaaagcagctgcagccgcctcctcgttcctctcctggatgggacagaatgtggcgtggagaagtggtgctccaaaggtcgctgccgctccctggtggagctgacccccatagcagcagtgcatgggcgctggtctagctggggtccccgaagtccttgctcccgctcctgcggaggaggtgtggtcaccaggaggcggcagtgcaacaaccccagacctgcctttggggggcgtgcatgtgttggtgctgacctccaggccgagatgtgcaacactcaggcctgcgagaagacccagctggagttcatgtcgcaacagtgcgccaggaccgacggccagccgctgcgctcctcccctggcggcgcctccttctaccactggggtgctgctgtaccacacagccaaggggatgctctgtgcagacacatgtgccgggccattggcgagagcttcatcatgaagcgtggagacagcttcctcgatgggacccggtgtatgccaagtggcccccgggaggacgggaccctgagcctgtgtgtgtcgggcagctgcaggacatttggctgtgatggtaggatggactcccagcaggtatgggacaggtgccaggtgtgtggtggggacaacagcacgtgcagcccacggaagggctctttcacagctggcagagcgagagaatatgtcacgtttctgacagttacccccaacctgaccagtgtctacattgccaaccacaggcctctcttcacacacttggcggtgaggatcggagggcgctatgtcgtggctgggaagatgagcatctcccctaacaccacctacccctccctcctggaggatggtcgtgtcgagtacagagtggccctcaccgaggaccggctgccccgcctggaggagatccgcatctggggacccctccaggaagatgctgacatccaggtttacaggcggtatggcgaggagtatggcaacctcacccgcccagacatcaccttcacctacttccagcctaagccacggcaggcctgggtgtgggccgctgtgcgtgggccctgctcggtgagctgtggggcagggctgcgctgggtaaactacagctgcctggaccaggccaggaaggagttggtggagactgtccagtgccaagggagccagcagccaccagcgtggccagaggcctgcgtgctcgaaccctgccctccctactgggcggtgggagacttcggcccatgcagcgcctcctgtgggggtggcctgcgggagcggccagtgcgctgcgtggaggcccagggcagcctcctgaagacattgcccccagcccggtgcagagcaggggcccagcagccagctgtggcgctggaaacctgcaacccccagccctgccctgccaggtgggaggtgtcagagcccagctcatgcacatcagctggtggagcaggcctggccttggagaacgagacctgtgtgccaggggcagatggcctggaggctccagtgactgaggggcctggctccgtagatgagaagctgcctgcccctgagccctgtgtcgggatgtcatgtcctccaggctggggccatctggatgccacctctgcaggggagaaggctccctccccatggggcagcatcaggacgggggctcaagctgcacacgtgtggacccctgcggcagggtcgtgctccgtctcctgcgggcgaggtctgatggagctccgtttcctgtgcatggactctgccctcagggtgcctgtccaggaagagctgtgtggcctggcaagcaagcctgggagccggcgggaggtctgccaggctgtcccgtgccctgctcggtggcagtacaagctggcggcctgcagcgtgagctgtgggagaggggtcgtgcggaggatcctgtattgtgcccgggcccatggggaggacgatggtgaggagatcctgttggacacccagtgccaggggctgcctcgcccggaaccccaggaggcctgcagcctggagccctgcccacctaggtggaaagtcatgtcccttggcccatgttcggccagctgtggccttggcactgctagacgctcggtggcctgtgtgcagctcgaccaaggccaggacgtggaggtggacgaggcggcctgtgcggcgctggtgcggcccgaggccagtgtcccctgtctcattgccgactgcacctaccgctggcatgttggcacctggatggagtgctctgtttcctgtggggatggcatccagcgccggcgtgacacctgcctcggaccccaggcccaggcgcctgtgccagctgatttctgccagcacttgcccaagccggtgactgtgcgtggctgctgggctgggccctgtgtgggacagggtacgcccagcctggtgccccacgaagaagccgctgtgccaggacggaccacagccacccctgctggtgcctccctggagtggtcccaggcccggggcctgctcttctccccggctccccagcctcggcggctcctgcccgggccccaggaaaactcagtgcagtccagtgcctgtggcaggcagcaccttgagccaacaggaaccattgacatgcgaggcccagggcaggcagactgtgcagtggccattgggcggcccctcggggaggtggtgaccctccgcgtccttgagagttctctcaactgcagtgcgggggacatgttgctgctttggggccggctcacctggaggaagatgtgcaggaagctgttggacatgactttcagctccaagaccaacacgctggtggtgaggcagcgctgcgggcggccaggaggtggggtgctgctgcggtatgggagccagcttgctcctgaaaccttctacagagaatgtgacatgcagctctttgggccctggggtgaaatcgtgagcccctcgctgagtccagccacgagtaatgcagggggctgccggctcttcattaatgtggctccgcacgcacggattgccatccatgccctggccaccaacatgggcgctgggaccgagggagccaatgccagctacatcttgatccgggacacccacagcttgaggaccacagcgttccatgggcagcaggtgctctactgggagtcagagagcagccaggctgagatggagttcagcgagggcttcctgaaggctcaggccagcctgcggggccagtactggaccctccaatcatgggtaccggagatgcaggaccctcagtcctggaagggaaaggaaggaacctctagagggcccttcgaacaaaaactcatctcagaagaggatctgaatatgcataccggtcatcatcaccatcaccat

SEQ ID NO: 89 - DNA, 4359 bp, Artificial Sequence
  Nucleotide sequence corresponding to Human ADAMTS13 protein with a single point mutation P1147V
atgcaccagcgtcacccccgggcaagatgccctcccctctgtgtggccggaatccttgcctgtggctttctcctgggctgctggggaccctcccatttccagcagagctgtcttcaggctttggagccacaggccgtgtcttcttacttgagccctggtgctcccttaaaaggccgccctccttcccctggcttccagaggcagaggcagaggcagaggcgggctgcaggcggcatcctacacctggagctgctggtggccgtgggccccgatgtcttccaggctcaccaggaggacacagagcgctatgtgctcaccaacctcaacatcggggcagaactgcttcgggacccgtccctgggggctcagtttcgggtgcacctggtgaagatggtcattctgacagagcctgagggtgctccaaatatcacagccaacctcacctcgtccctgctgagcgtctgtgggtggagccagaccatcaaccctgaggacgacacggatcctggccatgctgacctggtcctctatatcactaggtttgacctggagttgcctgatggtaaccggcaggtgcggggcgtcacccagctgggcggtgcctgctccccaacctggagctgcctcattaccgaggacactggcttcgacctgggagtcaccattgcccatgagattgggcacagcttcggcctggagcacgacggcgcgcccggcagcggctgcggccccagcggacacgtgatggcttcggacggcgccgcgccccgcgccggcctcgcctggtccccctgcagccgccggcagctgctgagcctgctcagcgcaggacgggcgcgctgcgtgtgggacccgccgcggcctcaacccgggtccgcggggcacccgccggatgcgcagcctggcctctactacagcgccaacgagcagtgccgcgtggccttcggccccaaggctgtcgcctgcaccttcgccagggagcacctggatatgtgccaggccctctcctgccacacagacccgctggaccaaagcagctgcagccgcctcctcgttcctctcctggatgggacagaatgtggcgtggagaagtggtgctccaaaggtcgctgccgctccctggtggagctgacccccatagcagcagtgcatgggcgctggtctagctggggtccccgaagtccttgctcccgctcctgcggaggaggtgtggtcaccaggaggcggcagtgcaacaaccccagacctgcctttggggggcgtgcatgtgttggtgctgacctccaggccgagatgtgcaacactcaggcctgcgagaagacccagctggagttcatgtcgcaacagtgcgccaggaccgacggccagccgctgcgctcctcccctggcggcgcctccttctaccactggggtgctgctgtaccacacagccaaggggatgctctgtgcagacacatgtgccgggccattggcgagagcttcatcatgaagcgtggagacagcttcctcgatgggacccggtgtatgccaagtggcccccgggaggacgggaccctgagcctgtgtgtgtcgggcagctgcaggacatttggctgtgatggtaggatggactcccagcaggtatgggacaggtgccaggtgtgtggtggggacaacagcacgtgcagcccacggaagggctctttcacagctggcagagcgagagaatatgtcacgtttctgacagttacccccaacctgaccagtgtctacattgccaaccacaggcctctcttcacacacttggcggtgaggatcggagggcgctatgtcgtggctgggaagatgagcatctcccctaacaccacctacccctccctcctggaggatggtcgtgtcgagtacagagtggccctcaccgaggaccggctgccccgcctggaggagatccgcatctggggacccctccaggaagatgctgacatccaggtttacaggcggtatggcgaggagtatggcaacctcacccgcccagacatcaccttcacctacttccagcctaagccacggcaggcctgggtgtgggccgctgtgcgtgggccctgctcggtgagctgtggggcagggctgcgctgggtaaactacagctgcctggaccaggccaggaaggagttggtggagactgtccagtgccaagggagccagcagccaccagcgtggccagaggcctgcgtgctcgaaccctgccctccctactgggcggtgggagacttcggcccatgcagcgcctcctgtgggggtggcctgcgggagcggccagtgcgctgcgtggaggcccagggcagcctcctgaagacattgcccccagcccggtgcagagcaggggcccagcagccagctgtggcgctggaaacctgcaacccccagccctgccctgccaggtgggaggtgtcagagcccagctcatgcacatcagctggtggagcaggcctggccttggagaacgagacctgtgtgccaggggcagatggcctggaggctccagtgactgaggggcctggctccgtagatgagaagctgcctgcccctgagccctgtgtcgggatgtcatgtcctccaggctggggccatctggatgccacctctgcaggggagaaggctccctccccatggggcagcatcaggacgggggctcaagctgcacacgtgtggacccctgcggcagggtcgtgctccgtctcctgcgggcgaggtctgatggagctccgtttcctgtgcatggactctgccctcagggtgcctgtccaggaagagctgtgtggcctggcaagcaagcctgggagccggcgggaggtctgccaggctgtcccgtgccctgctcggtggcagtacaagctggcggcctgcagcgtgagctgtgggagaggggtcgtgcggaggatcctgtattgtgcccgggcccatggggaggacgatggtgaggagatcctgttggacacccagtgccaggggctgcctcgcccggaaccccaggaggcctgcagcctggagccctgcccacctaggtggaaagtcatgtcccttggcccatgttcggccagctgtggccttggcactgctagacgctcggtggcctgtgtgcagctcgaccaaggccaggacgtggaggtggacgaggcggcctgtgcggcgctggtgcggcccgaggccagtgtcccctgtctcattgccgactgcacctaccgctggcatgttggcacctggatggagtgctctgtttcctgtggggatggcatccagcgccggcgtgacacctgcctcggaccccaggcccaggcgcctgtgccagctgatttctgccagcacttgcccaagccggtgactgtgcgtggctgctgggctgggccctgtgtgggacagggtacgcccagcctggtgccccacgaagaagccgctgctgtgggacggaccacagccacccctgctggtgcctccctggagtggtcccaggcccggggcctgctcttctccccggctccccagcctcggcggctcctgcccgggccccaggaaaactcagtgcagtccagtgcctgtggcaggcagcaccttgagccaacaggaaccattgacatgcgaggcccagggcaggcagactgtgcagtggccattgggcggcccctcggggaggtggtgaccctccgcgtccttgagagttctctcaactgcagtgcgggggacatgttgctgctttggggccggctcacctggaggaagatgtgcaggaagctgttggacatgactttcagctccaagaccaacacgctggtggtgaggcagcgctgcgggcggccaggaggtggggtgctgctgcggtatgggagccagcttgctcctgaaaccttctacagagaatgtgacatgcagctctttgggccctggggtgaaatcgtgagcccctcgctgagtccagccacgagtaatgcagggggctgccggctcttcattaatgtggctccgcacgcacggattgccatccatgccctggccaccaacatgggcgctgggaccgagggagccaatgccagctacatcttgatccgggacacccacagcttgaggaccacagcgttccatgggcagcaggtgctctactgggagtcagagagcagccaggctgagatggagttcagcgagggcttcctgaaggctcaggccagcctgcggggccagtactggaccctccaatcatgggtaccggagatgcaggaccctcagtcctggaagggaaaggaaggaacctctagagggcccttcgaacaaaaactcatctcagaagaggatctgaatatgcataccggtcatcatcaccatcaccat

SEQ ID NO: 90 - DNA, 4359 bp, Artificial Sequence
  Nucleotide sequence corresponding to Human ADAMTS13 protein with a single point mutation P1154V
atgcaccagcgtcacccccgggcaagatgccctcccctctgtgtggccggaatccttgcctgtggctttctcctgggctgctggggaccctcccatttccagcagagctgtcttcaggctttggagccacaggccgtgtcttcttacttgagccctggtgctcccttaaaaggccgccctccttcccctggcttccagaggcagaggcagaggcagaggcgggctgcaggcggcatcctacacctggagctgctggtggccgtgggccccgatgtcttccaggctcaccaggaggacacagagcgctatgtgctcaccaacctcaacatcggggcagaactgcttcgggacccgtccctgggggctcagtttcgggtgcacctggtgaagatggtcattctgacagagcctgagggtgctccaaatatcacagccaacctcacctcgtccctgctgagcgtctgtgggtggagccagaccatcaaccctgaggacgacacggatcctggccatgctgacctggtcctctatatcactaggtttgacctggagttgcctgatggtaaccggcaggtgcggggcgtcacccagctgggcggtgcctgctccccaacctggagctgcctcattaccgaggacactggcttcgacctgggagtcaccattgcccatgagattgggcacagcttcggcctggagcacgacggcgcgcccggcagcggctgcggccccagcggacacgtgatggcttcggacggcgccgcgccccgcgccggcctcgcctggtccccctgcagccgccggcagctgctgagcctgctcagcgcaggacgggcgcgctgcgtgtgggacccgccgcggcctcaacccgggtccgcggggcacccgccggatgcgcagcctggcctctactacagcgccaacgagcagtgccgcgtggccttcggccccaaggctgtcgcctgcaccttcgccagggagcacctggatatgtgccaggccctctcctgccacacagacccgctggaccaaagcagctgcagccgcctcctcgttcctctcctggatgggacagaatgtggcgtggagaagtggtgctccaaaggtcgctgccgctccctggtggagctgacccccatagcagcagtgcatgggcgctggtctagctggggtccccgaagtccttgctcccgctcctgcggaggaggtgtggtcaccaggaggcggcagtgcaacaaccccagacctgcctttggggggcgtgcatgtgttggtgctgacctccaggccgagatgtgcaacactcaggcctgcgagaagacccagctggagttcatgtcgcaacagtgcgccaggaccgacggccagccgctgcgctcctcccctggcggcgcctccttctaccactggggtgctgctgtaccacacagccaaggggatgctctgtgcagacacatgtgccgggccattggcgagagcttcatcatgaagcgtggagacagcttcctcgatgggacccggtgtatgccaagtggcccccgggaggacgggaccctgagcctgtgtgtgtcgggcagctgcaggacatttggctgtgatggtaggatggactcccagcaggtatgggacaggtgccaggtgtgtggtggggacaacagcacgtgcagcccacggaagggctctttcacagctggcagagcgagagaatatgtcacgtttctgacagttacccccaacctgaccagtgtctacattgccaaccacaggcctctcttcacacacttggcggtgaggatcggagggcgctatgtcgtggctgggaagatgagcatctcccctaacaccacctacccctccctcctggaggatggtcgtgtcgagtacagagtggccctcaccgaggaccggctgccccgcctggaggagatccgcatctggggacccctccaggaagatgctgacatccaggtttacaggcggtatggcgaggagtatggcaacctcacccgcccagacatcaccttcacctacttccagcctaagccacggcaggcctgggtgtgggccgctgtgcgtgggccctgctcggtgagctgtggggcagggctgcgctgggtaaactacagctgcctggaccaggccaggaaggagttggtggagactgtccagtgccaagggagccagcagccaccagcgtggccagaggcctgcgtgctcgaaccctgccctccctactgggcggtgggagacttcggcccatgcagcgcctcctgtgggggtggcctgcgggagcggccagtgcgctgcgtggaggcccagggcagcctcctgaagacattgcccccagcccggtgcagagcaggggcccagcagccagctgtggcgctggaaacctgcaacccccagccctgccctgccaggtgggaggtgtcagagcccagctcatgcacatcagctggtggagcaggcctggccttggagaacgagacctgtgtgccaggggcagatggcctggaggctccagtgactgaggggcctggctccgtagatgagaagctgcctgcccctgagccctgtgtcgggatgtcatgtcctccaggctggggccatctggatgccacctctgcaggggagaaggctccctccccatggggcagcatcaggacgggggctcaagctgcacacgtgtggacccctgcggcagggtcgtgctccgtctcctgcgggcgaggtctgatggagctccgtttcctgtgcatggactctgccctcagggtgcctgtccaggaagagctgtgtggcctggcaagcaagcctgggagccggcgggaggtctgccaggctgtcccgtgccctgctcggtggcagtacaagctggcggcctgcagcgtgagctgtgggagaggggtcgtgcggaggatcctgtattgtgcccgggcccatggggaggacgatggtgaggagatcctgttggacacccagtgccaggggctgcctcgcccggaaccccaggaggcctgcagcctggagccctgcccacctaggtggaaagtcatgtcccttggcccatgttcggccagctgtggccttggcactgctagacgctcggtggcctgtgtgcagctcgaccaaggccaggacgtggaggtggacgaggcggcctgtgcggcgctggtgcggcccgaggccagtgtcccctgtctcattgccgactgcacctaccgctggcatgttggcacctggatggagtgctctgtttcctgtggggatggcatccagcgccggcgtgacacctgcctcggaccccaggcccaggcgcctgtgccagctgatttctgccagcacttgcccaagccggtgactgtgcgtggctgctgggctgggccctgtgtgggacagggtacgcccagcctggtgccccacgaagaagccgctgctccaggacggaccacagccaccgtggctggtgcctccctggagtggtcccaggcccggggcctgctcttctccccggctccccagcctcggcggctcctgcccgggccccaggaaaactcagtgcagtccagtgcctgtggcaggcagcaccttgagccaacaggaaccattgacatgcgaggcccagggcaggcagactgtgcagtggccattgggcggcccctcggggaggtggtgaccctccgcgtccttgagagttctctcaactgcagtgcgggggacatgttgctgctttggggccggctcacctggaggaagatgtgcaggaagctgttggacatgactttcagctccaagaccaacacgctggtggtgaggcagcgctgcgggcggccaggaggtggggtgctgctgcggtatgggagccagcttgctcctgaaaccttctacagagaatgtgacatgcagctctttgggccctggggtgaaatcgtgagcccctcgctgagtccagccacgagtaatgcagggggctgccggctcttcattaatgtggctccgcacgcacggattgccatccatgccctggccaccaacatgggcgctgggaccgagggagccaatgccagctacatcttgatccgggacacccacagcttgaggaccacagcgttccatgggcagcaggtgctctactgggagtcagagagcagccaggctgagatggagttcagcgagggcttcctgaaggctcaggccagcctgcggggccagtactggaccctccaatcatgggtaccggagatgcaggaccctcagtcctggaagggaaaggaaggaacctctagagggcccttcgaacaaaaactcatctcagaagaggatctgaatatgcataccggtcatcatcaccatcaccat

SEQ ID NO: 91 - DNA, 4359 bp, Artificial Sequence
  Nucleotide sequence corresponding to Human ADAMTS13 protein with a single point mutation P1171V
atgcaccagcgtcacccccgggcaagatgccctcccctctgtgtggccggaatccttgcctgtggctttctcctgggctgctggggaccctcccatttccagcagagctgtcttcaggctttggagccacaggccgtgtcttcttacttgagccctggtgctcccttaaaaggccgccctccttcccctggcttccagaggcagaggcagaggcagaggcgggctgcaggcggcatcctacacctggagctgctggtggccgtgggccccgatgtcttccaggctcaccaggaggacacagagcgctatgtgctcaccaacctcaacatcggggcagaactgcttcgggacccgtccctgggggctcagtttcgggtgcacctggtgaagatggtcattctgacagagcctgagggtgctccaaatatcacagccaacctcacctcgtccctgctgagcgtctgtgggtggagccagaccatcaaccctgaggacgacacggatcctggccatgctgacctggtcctctatatcactaggtttgacctggagttgcctgatggtaaccggcaggtgcggggcgtcacccagctgggcggtgcctgctccccaacctggagctgcctcattaccgaggacactggcttcgacctgggagtcaccattgcccatgagattgggcacagcttcggcctggagcacgacggcgcgcccggcagcggctgcggccccagcggacacgtgatggcttcggacggcgccgcgccccgcgccggcctcgcctggtccccctgcagccgccggcagctgctgagcctgctcagcgcaggacgggcgcgctgcgtgtgggacccgccgcggcctcaacccgggtccgcggggcacccgccggatgcgcagcctggcctctactacagcgccaacgagcagtgccgcgtggccttcggccccaaggctgtcgcctgcaccttcgccagggagcacctggatatgtgccaggccctctcctgccacacagacccgctggaccaaagcagctgcagccgcctcctcgttcctctcctggatgggacagaatgtggcgtggagaagtggtgctccaaaggtcgctgccgctccctggtggagctgacccccatagcagcagtgcatgggcgctggtctagctggggtccccgaagtccttgctcccgctcctgcggaggaggtgtggtcaccaggaggcggcagtgcaacaaccccagacctgcctttggggggcgtgcatgtgttggtgctgacctccaggccgagatgtgcaacactcaggcctgcgagaagacccagctggagttcatgtcgcaacagtgcgccaggaccgacggccagccgctgcgctcctcccctggcggcgcctccttctaccactggggtgctgctgtaccacacagccaaggggatgctctgtgcagacacatgtgccgggccattggcgagagcttcatcatgaagcgtggagacagcttcctcgatgggacccggtgtatgccaagtggcccccgggaggacgggaccctgagcctgtgtgtgtcgggcagctgcaggacatttggctgtgatggtaggatggactcccagcaggtatgggacaggtgccaggtgtgtggtggggacaacagcacgtgcagcccacggaagggctctttcacagctggcagagcgagagaatatgtcacgtttctgacagttacccccaacctgaccagtgtctacattgccaaccacaggcctctcttcacacacttggcggtgaggatcggagggcgctatgtcgtggctgggaagatgagcatctcccctaacaccacctacccctccctcctggaggatggtcgtgtcgagtacagagtggccctcaccgaggaccggctgccccgcctggaggagatccgcatctggggacccctccaggaagatgctgacatccaggtttacaggcggtatggcgaggagtatggcaacctcacccgcccagacatcaccttcacctacttccagcctaagccacggcaggcctgggtgtgggccgctgtgcgtgggccctgctcggtgagctgtggggcagggctgcgctgggtaaactacagctgcctggaccaggccaggaaggagttggtggagactgtccagtgccaagggagccagcagccaccagcgtggccagaggcctgcgtgctcgaaccctgccctccctactgggcggtgggagacttcggcccatgcagcgcctcctgtgggggtggcctgcgggagcggccagtgcgctgcgtggaggcccagggcagcctcctgaagacattgcccccagcccggtgcagagcaggggcccagcagccagctgtggcgctggaaacctgcaacccccagccctgccctgccaggtgggaggtgtcagagcccagctcatgcacatcagctggtggagcaggcctggccttggagaacgagacctgtgtgccaggggcagatggcctggaggctccagtgactgaggggcctggctccgtagatgagaagctgcctgcccctgagccctgtgtcgggatgtcatgtcctccaggctggggccatctggatgccacctctgcaggggagaaggctccctccccatggggcagcatcaggacgggggctcaagctgcacacgtgtggacccctgcggcagggtcgtgctccgtctcctgcgggcgaggtctgatggagctccgtttcctgtgcatggactctgccctcagggtgcctgtccaggaagagctgtgtggcctggcaagcaagcctgggagccggcgggaggtctgccaggctgtcccgtgccctgctcggtggcagtacaagctggcggcctgcagcgtgagctgtgggagaggggtcgtgcggaggatcctgtattgtgcccgggcccatggggaggacgatggtgaggagatcctgttggacacccagtgccaggggctgcctcgcccggaaccccaggaggcctgcagcctggagccctgcccacctaggtggaaagtcatgtcccttggcccatgttcggccagctgtggccttggcactgctagacgctcggtggcctgtgtgcagctcgaccaaggccaggacgtggaggtggacgaggcggcctgtgcggcgctggtgcggcccgaggccagtgtcccctgtctcattgccgactgcacctaccgctggcatgttggcacctggatggagtgctctgtttcctgtggggatggcatccagcgccggcgtgacacctgcctcggaccccaggcccaggcgcctgtgccagctgatttctgccagcacttgcccaagccggtgactgtgcgtggctgctgggctgggccctgtgtgggacagggtacgcccagcctggtgccccacgaagaagccgctgctccaggacggaccacagccacccctgctggtgcctccctggagtggtcccaggcccggggcctgctcttctccgtggctccccagcctcggcggctcctgcccgggccccaggaaaactcagtgcagtccagtgcctgtggcaggcagcaccttgagccaacaggaaccattgacatgcgaggcccagggcaggcagactgtgcagtggccattgggcggcccctcggggaggtggtgaccctccgcgtccttgagagttctctcaactgcagtgcgggggacatgttgctgctttggggccggctcacctggaggaagatgtgcaggaagctgttggacatgactttcagctccaagaccaacacgctggtggtgaggcagcgctgcgggcggccaggaggtggggtgctgctgcggtatgggagccagcttgctcctgaaaccttctacagagaatgtgacatgcagctctttgggccctggggtgaaatcgtgagcccctcgctgagtccagccacgagtaatgcagggggctgccggctcttcattaatgtggctccgcacgcacggattgccatccatgccctggccaccaacatgggcgctgggaccgagggagccaatgccagctacatcttgatccgggacacccacagcttgaggaccacagcgttccatgggcagcaggtgctctactgggagtcagagagcagccaggctgagatggagttcagcgagggcttcctgaaggctcaggccagcctgcggggccagtactggaccctccaatcatgggtaccggagatgcaggaccctcagtcctggaagggaaaggaaggaacctctagagggcccttcgaacaaaaactcatctcagaagaggatctgaatatgcataccggtcatcatcaccatcaccat

SEQ ID NO: 92 - DNA, 4359 bp, Artificial Sequence
  Nucleotide sequence corresponding to Human ADAMTS13 protein with a single point mutation P1173V
atgcaccagcgtcacccccgggcaagatgccctcccctctgtgtggccggaatccttgcctgtggctttctcctgggctgctggggaccctcccatttccagcagagctgtcttcaggctttggagccacaggccgtgtcttcttacttgagccctggtgctcccttaaaaggccgccctccttcccctggcttccagaggcagaggcagaggcagaggcgggctgcaggcggcatcctacacctggagctgctggtggccgtgggccccgatgtcttccaggctcaccaggaggacacagagcgctatgtgctcaccaacctcaacatcggggcagaactgcttcgggacccgtccctgggggctcagtttcgggtgcacctggtgaagatggtcattctgacagagcctgagggtgctccaaatatcacagccaacctcacctcgtccctgctgagcgtctgtgggtggagccagaccatcaaccctgaggacgacacggatcctggccatgctgacctggtcctctatatcactaggtttgacctggagttgcctgatggtaaccggcaggtgcggggcgtcacccagctgggcggtgcctgctccccaacctggagctgcctcattaccgaggacactggcttcgacctgggagtcaccattgcccatgagattgggcacagcttcggcctggagcacgacggcgcgcccggcagcggctgcggccccagcggacacgtgatggcttcggacggcgccgcgccccgcgccggcctcgcctggtccccctgcagccgccggcagctgctgagcctgctcagcgcaggacgggcgcgctgcgtgtgggacccgccgcggcctcaacccgggtccgcggggcacccgccggatgcgcagcctggcctctactacagcgccaacgagcagtgccgcgtggccttcggccccaaggctgtcgcctgcaccttcgccagggagcacctggatatgtgccaggccctctcctgccacacagacccgctggaccaaagcagctgcagccgcctcctcgttcctctcctggatgggacagaatgtggcgtggagaagtggtgctccaaaggtcgctgccgctccctggtggagctgacccccatagcagcagtgcatgggcgctggtctagctggggtccccgaagtccttgctcccgctcctgcggaggaggtgtggtcaccaggaggcggcagtgcaacaaccccagacctgcctttggggggcgtgcatgtgttggtgctgacctccaggccgagatgtgcaacactcaggcctgcgagaagacccagctggagttcatgtcgcaacagtgcgccaggaccgacggccagccgctgcgctcctcccctggcggcgcctccttctaccactggggtgctgctgtaccacacagccaaggggatgctctgtgcagacacatgtgccgggccattggcgagagcttcatcatgaagcgtggagacagcttcctcgatgggacccggtgtatgccaagtggcccccgggaggacgggaccctgagcctgtgtgtgtcgggcagctgcaggacatttggctgtgatggtaggatggactcccagcaggtatgggacaggtgccaggtgtgtggtggggacaacagcacgtgcagcccacggaagggctctttcacagctggcagagcgagagaatatgtcacgtttctgacagttacccccaacctgaccagtgtctacattgccaaccacaggcctctcttcacacacttggcggtgaggatcggagggcgctatgtcgtggctgggaagatgagcatctcccctaacaccacctacccctccctcctggaggatggtcgtgtcgagtacagagtggccctcaccgaggaccggctgccccgcctggaggagatccgcatctggggacccctccaggaagatgctgacatccaggtttacaggcggtatggcgaggagtatggcaacctcacccgcccagacatcaccttcacctacttccagcctaagccacggcaggcctgggtgtgggccgctgtgcgtgggccctgctcggtgagctgtggggcagggctgcgctgggtaaactacagctgcctggaccaggccaggaaggagttggtggagactgtccagtgccaagggagccagcagccaccagcgtggccagaggcctgcgtgctcgaaccctgccctccctactgggcggtgggagacttcggcccatgcagcgcctcctgtgggggtggcctgcgggagcggccagtgcgctgcgtggaggcccagggcagcctcctgaagacattgcccccagcccggtgcagagcaggggcccagcagccagctgtggcgctggaaacctgcaacccccagccctgccctgccaggtgggaggtgtcagagcccagctcatgcacatcagctggtggagcaggcctggccttggagaacgagacctgtgtgccaggggcagatggcctggaggctccagtgactgaggggcctggctccgtagatgagaagctgcctgcccctgagccctgtgtcgggatgtcatgtcctccaggctggggccatctggatgccacctctgcaggggagaaggctccctccccatggggcagcatcaggacgggggctcaagctgcacacgtgtggacccctgcggcagggtcgtgctccgtctcctgcgggcgaggtctgatggagctccgtttcctgtgcatggactctgccctcagggtgcctgtccaggaagagctgtgtggcctggcaagcaagcctgggagccggcgggaggtctgccaggctgtcccgtgccctgctcggtggcagtacaagctggcggcctgcagcgtgagctgtgggagaggggtcgtgcggaggatcctgtattgtgcccgggcccatggggaggacgatggtgaggagatcctgttggacacccagtgccaggggctgcctcgcccggaaccccaggaggcctgcagcctggagccctgcccacctaggtggaaagtcatgtcccttggcccatgttcggccagctgtggccttggcactgctagacgctcggtggcctgtgtgcagctcgaccaaggccaggacgtggaggtggacgaggcggcctgtgcggcgctggtgcggcccgaggccagtgtcccctgtctcattgccgactgcacctaccgctggcatgttggcacctggatggagtgctctgtttcctgtggggatggcatccagcgccggcgtgacacctgcctcggaccccaggcccaggcgcctgtgccagctgatttctgccagcacttgcccaagccggtgactgtgcgtggctgctgggctgggccctgtgtgggacagggtacgcccagcctggtgccccacgaagaagccgctgctccaggacggaccacagccacccctgctggtgcctccctggagtggtcccaggcccggggcctgctcttctccccggctgtgcagcctcggcggctcctgcccgggccccaggaaaactcagtgcagtccagtgcctgtggcaggcagcaccttgagccaacaggaaccattgacatgcgaggcccagggcaggcagactgtgcagtggccattgggcggcccctcggggaggtggtgaccctccgcgtccttgagagttctctcaactgcagtgcgggggacatgttgctgctttggggccggctcacctggaggaagatgtgcaggaagctgttggacatgactttcagctccaagaccaacacgctggtggtgaggcagcgctgcgggcggccaggaggtggggtgctgctgcggtatgggagccagcttgctcctgaaaccttctacagagaatgtgacatgcagctctttgggccctggggtgaaatcgtgagcccctcgctgagtccagccacgagtaatgcagggggctgccggctcttcattaatgtggctccgcacgcacggattgccatccatgccctggccaccaacatgggcgctgggaccgagggagccaatgccagctacatcttgatccgggacacccacagcttgaggaccacagcgttccatgggcagcaggtgctctactgggagtcagagagcagccaggctgagatggagttcagcgagggcttcctgaaggctcaggccagcctgcggggccagtactggaccctccaatcatgggtaccggagatgcaggaccctcagtcctggaagggaaaggaaggaacctctagagggcccttcgaacaaaaactcatctcagaagaggatctgaatatgcataccggtcatcatcaccatcaccat

SEQ ID NO: 93 - DNA, 4359 bp, Artificial Sequence
  Nucleotide sequence corresponding to Human ADAMTS13 protein with a single point mutation P1175V
atgcaccagcgtcacccccgggcaagatgccctcccctctgtgtggccggaatccttgcctgtggctttctcctgggctgctggggaccctcccatttccagcagagctgtcttcaggctttggagccacaggccgtgtcttcttacttgagccctggtgctcccttaaaaggccgccctccttcccctggcttccagaggcagaggcagaggcagaggcgggctgcaggcggcatcctacacctggagctgctggtggccgtgggccccgatgtcttccaggctcaccaggaggacacagagcgctatgtgctcaccaacctcaacatcggggcagaactgcttcgggacccgtccctgggggctcagtttcgggtgcacctggtgaagatggtcattctgacagagcctgagggtgctccaaatatcacagccaacctcacctcgtccctgctgagcgtctgtgggtggagccagaccatcaaccctgaggacgacacggatcctggccatgctgacctggtcctctatatcactaggtttgacctggagttgcctgatggtaaccggcaggtgcggggcgtcacccagctgggcggtgcctgctccccaacctggagctgcctcattaccgaggacactggcttcgacctgggagtcaccattgcccatgagattgggcacagcttcggcctggagcacgacggcgcgcccggcagcggctgcggccccagcggacacgtgatggcttcggacggcgccgcgccccgcgccggcctcgcctggtccccctgcagccgccggcagctgctgagcctgctcagcgcaggacgggcgcgctgcgtgtgggacccgccgcggcctcaacccgggtccgcggggcacccgccggatgcgcagcctggcctctactacagcgccaacgagcagtgccgcgtggccttcggccccaaggctgtcgcctgcaccttcgccagggagcacctggatatgtgccaggccctctcctgccacacagacccgctggaccaaagcagctgcagccgcctcctcgttcctctcctggatgggacagaatgtggcgtggagaagtggtgctccaaaggtcgctgccgctccctggtggagctgacccccatagcagcagtgcatgggcgctggtctagctggggtccccgaagtccttgctcccgctcctgcggaggaggtgtggtcaccaggaggcggcagtgcaacaaccccagacctgcctttggggggcgtgcatgtgttggtgctgacctccaggccgagatgtgcaacactcaggcctgcgagaagacccagctggagttcatgtcgcaacagtgcgccaggaccgacggccagccgctgcgctcctcccctggcggcgcctccttctaccactggggtgctgctgtaccacacagccaaggggatgctctgtgcagacacatgtgccgggccattggcgagagcttcatcatgaagcgtggagacagcttcctcgatgggacccggtgtatgccaagtggcccccgggaggacgggaccctgagcctgtgtgtgtcgggcagctgcaggacatttggctgtgatggtaggatggactcccagcaggtatgggacaggtgccaggtgtgtggtggggacaacagcacgtgcagcccacggaagggctctttcacagctggcagagcgagagaatatgtcacgtttctgacagttacccccaacctgaccagtgtctacattgccaaccacaggcctctcttcacacacttggcggtgaggatcggagggcgctatgtcgtggctgggaagatgagcatctcccctaacaccacctacccctccctcctggaggatggtcgtgtcgagtacagagtggccctcaccgaggaccggctgccccgcctggaggagatccgcatctggggacccctccaggaagatgctgacatccaggtttacaggcggtatggcgaggagtatggcaacctcacccgcccagacatcaccttcacctacttccagcctaagccacggcaggcctgggtgtgggccgctgtgcgtgggccctgctcggtgagctgtggggcagggctgcgctgggtaaactacagctgcctggaccaggccaggaaggagttggtggagactgtccagtgccaagggagccagcagccaccagcgtggccagaggcctgcgtgctcgaaccctgccctccctactgggcggtgggagacttcggcccatgcagcgcctcctgtgggggtggcctgcgggagcggccagtgcgctgcgtggaggcccagggcagcctcctgaagacattgcccccagcccggtgcagagcaggggcccagcagccagctgtggcgctggaaacctgcaacccccagccctgccctgccaggtgggaggtgtcagagcccagctcatgcacatcagctggtggagcaggcctggccttggagaacgagacctgtgtgccaggggcagatggcctggaggctccagtgactgaggggcctggctccgtagatgagaagctgcctgcccctgagccctgtgtcgggatgtcatgtcctccaggctggggccatctggatgccacctctgcaggggagaaggctccctccccatggggcagcatcaggacgggggctcaagctgcacacgtgtggacccctgcggcagggtcgtgctccgtctcctgcgggcgaggtctgatggagctccgtttcctgtgcatggactctgccctcagggtgcctgtccaggaagagctgtgtggcctggcaagcaagcctgggagccggcgggaggtctgccaggctgtcccgtgccctgctcggtggcagtacaagctggcggcctgcagcgtgagctgtgggagaggggtcgtgcggaggatcctgtattgtgcccgggcccatggggaggacgatggtgaggagatcctgttggacacccagtgccaggggctgcctcgcccggaaccccaggaggcctgcagcctggagccctgcccacctaggtggaaagtcatgtcccttggcccatgttcggccagctgtggccttggcactgctagacgctcggtggcctgtgtgcagctcgaccaaggccaggacgtggaggtggacgaggcggcctgtgcggcgctggtgcggcccgaggccagtgtcccctgtctcattgccgactgcacctaccgctggcatgttggcacctggatggagtgctctgtttcctgtggggatggcatccagcgccggcgtgacacctgcctcggaccccaggcccaggcgcctgtgccagctgatttctgccagcacttgcccaagccggtgactgtgcgtggctgctgggctgggccctgtgtgggacagggtacgcccagcctggtgccccacgaagaagccgctgctccaggacggaccacagccacccctgctggtgcctccctggagtggtcccaggcccggggcctgctcttctccccggctccccaggtgcggcggctcctgcccgggccccaggaaaactcagtgcagtccagtgcctgtggcaggcagcaccttgagccaacaggaaccattgacatgcgaggcccagggcaggcagactgtgcagtggccattgggcggcccctcggggaggtggtgaccctccgcgtccttgagagttctctcaactgcagtgcgggggacatgttgctgctttggggccggctcacctggaggaagatgtgcaggaagctgttggacatgactttcagctccaagaccaacacgctggtggtgaggcagcgctgcgggcggccaggaggtggggtgctgctgcggtatgggagccagcttgctcctgaaaccttctacagagaatgtgacatgcagctctttgggccctggggtgaaatcgtgagcccctcgctgagtccagccacgagtaatgcagggggctgccggctcttcattaatgtggctccgcacgcacggattgccatccatgccctggccaccaacatgggcgctgggaccgagggagccaatgccagctacatcttgatccgggacacccacagcttgaggaccacagcgttccatgggcagcaggtgctctactgggagtcagagagcagccaggctgagatggagttcagcgagggcttcctgaaggctcaggccagcctgcggggccagtactggaccctccaatcatgggtaccggagatgcaggaccctcagtcctggaagggaaaggaaggaacctctagagggcccttcgaacaaaaactcatctcagaagaggatctgaatatgcataccggtcatcatcaccatcaccat

SEQ ID NO: 94 - DNA, 4359 bp, Artificial Sequence
  Nucleotide sequence corresponding to Human ADAMTS13 protein with a single point mutation P1180V
atgcaccagcgtcacccccgggcaagatgccctcccctctgtgtggccggaatccttgcctgtggctttctcctgggctgctggggaccctcccatttccagcagagctgtcttcaggctttggagccacaggccgtgtcttcttacttgagccctggtgctcccttaaaaggccgccctccttcccctggcttccagaggcagaggcagaggcagaggcgggctgcaggcggcatcctacacctggagctgctggtggccgtgggccccgatgtcttccaggctcaccaggaggacacagagcgctatgtgctcaccaacctcaacatcggggcagaactgcttcgggacccgtccctgggggctcagtttcgggtgcacctggtgaagatggtcattctgacagagcctgagggtgctccaaatatcacagccaacctcacctcgtccctgctgagcgtctgtgggtggagccagaccatcaaccctgaggacgacacggatcctggccatgctgacctggtcctctatatcactaggtttgacctggagttgcctgatggtaaccggcaggtgcggggcgtcacccagctgggcggtgcctgctccccaacctggagctgcctcattaccgaggacactggcttcgacctgggagtcaccattgcccatgagattgggcacagcttcggcctggagcacgacggcgcgcccggcagcggctgcggccccagcggacacgtgatggcttcggacggcgccgcgccccgcgccggcctcgcctggtccccctgcagccgccggcagctgctgagcctgctcagcgcaggacgggcgcgctgcgtgtgggacccgccgcggcctcaacccgggtccgcggggcacccgccggatgcgcagcctggcctctactacagcgccaacgagcagtgccgcgtggccttcggccccaaggctgtcgcctgcaccttcgccagggagcacctggatatgtgccaggccctctcctgccacacagacccgctggaccaaagcagctgcagccgcctcctcgttcctctcctggatgggacagaatgtggcgtggagaagtggtgctccaaaggtcgctgccgctccctggtggagctgacccccatagcagcagtgcatgggcgctggtctagctggggtccccgaagtccttgctcccgctcctgcggaggaggtgtggtcaccaggaggcggcagtgcaacaaccccagacctgcctttggggggcgtgcatgtgttggtgctgacctccaggccgagatgtgcaacactcaggcctgcgagaagacccagctggagttcatgtcgcaacagtgcgccaggaccgacggccagccgctgcgctcctcccctggcggcgcctccttctaccactggggtgctgctgtaccacacagccaaggggatgctctgtgcagacacatgtgccgggccattggcgagagcttcatcatgaagcgtggagacagcttcctcgatgggacccggtgtatgccaagtggcccccgggaggacgggaccctgagcctgtgtgtgtcgggcagctgcaggacatttggctgtgatggtaggatggactcccagcaggtatgggacaggtgccaggtgtgtggtggggacaacagcacgtgcagcccacggaagggctctttcacagctggcagagcgagagaatatgtcacgtttctgacagttacccccaacctgaccagtgtctacattgccaaccacaggcctctcttcacacacttggcggtgaggatcggagggcgctatgtcgtggctgggaagatgagcatctcccctaacaccacctacccctccctcctggaggatggtcgtgtcgagtacagagtggccctcaccgaggaccggctgccccgcctggaggagatccgcatctggggacccctccaggaagatgctgacatccaggtttacaggcggtatggcgaggagtatggcaacctcacccgcccagacatcaccttcacctacttccagcctaagccacggcaggcctgggtgtgggccgctgtgcgtgggccctgctcggtgagctgtggggcagggctgcgctgggtaaactacagctgcctggaccaggccaggaaggagttggtggagactgtccagtgccaagggagccagcagccaccagcgtggccagaggcctgcgtgctcgaaccctgccctccctactgggcggtgggagacttcggcccatgcagcgcctcctgtgggggtggcctgcgggagcggccagtgcgctgcgtggaggcccagggcagcctcctgaagacattgcccccagcccggtgcagagcaggggcccagcagccagctgtggcgctggaaacctgcaacccccagccctgccctgccaggtgggaggtgtcagagcccagctcatgcacatcagctggtggagcaggcctggccttggagaacgagacctgtgtgccaggggcagatggcctggaggctccagtgactgaggggcctggctccgtagatgagaagctgcctgcccctgagccctgtgtcgggatgtcatgtcctccaggctggggccatctggatgccacctctgcaggggagaaggctccctccccatggggcagcatcaggacgggggctcaagctgcacacgtgtggacccctgcggcagggtcgtgctccgtctcctgcgggcgaggtctgatggagctccgtttcctgtgcatggactctgccctcagggtgcctgtccaggaagagctgtgtggcctggcaagcaagcctgggagccggcgggaggtctgccaggctgtcccgtgccctgctcggtggcagtacaagctggcggcctgcagcgtgagctgtgggagaggggtcgtgcggaggatcctgtattgtgcccgggcccatggggaggacgatggtgaggagatcctgttggacacccagtgccaggggctgcctcgcccggaaccccaggaggcctgcagcctggagccctgcccacctaggtggaaagtcatgtcccttggcccatgttcggccagctgtggccttggcactgctagacgctcggtggcctgtgtgcagctcgaccaaggccaggacgtggaggtggacgaggcggcctgtgcggcgctggtgcggcccgaggccagtgtcccctgtctcattgccgactgcacctaccgctggcatgttggcacctggatggagtgctctgtttcctgtggggatggcatccagcgccggcgtgacacctgcctcggaccccaggcccaggcgcctgtgccagctgatttctgccagcacttgcccaagccggtgactgtgcgtggctgctgggctgggccctgtgtgggacagggtacgcccagcctggtgccccacgaagaagccgctgctccaggacggaccacagccacccctgctggtgcctccctggagtggtcccaggcccggggcctgctcttctccccggctccccagcctcggcggctcctggtggggccccaggaaaactcagtgcagtccagtgcctgtggcaggcagcaccttgagccaacaggaaccattgacatgcgaggcccagggcaggcagactgtgcagtggccattgggcggcccctcggggaggtggtgaccctccgcgtccttgagagttctctcaactgcagtgcgggggacatgttgctgctttggggccggctcacctggaggaagatgtgcaggaagctgttggacatgactttcagctccaagaccaacacgctggtggtgaggcagcgctgcgggcggccaggaggtggggtgctgctgcggtatgggagccagcttgctcctgaaaccttctacagagaatgtgacatgcagctctttgggccctggggtgaaatcgtgagcccctcgctgagtccagccacgagtaatgcagggggctgccggctcttcattaatgtggctccgcacgcacggattgccatccatgccctggccaccaacatgggcgctgggaccgagggagccaatgccagctacatcttgatccgggacacccacagcttgaggaccacagcgttccatgggcagcaggtgctctactgggagtcagagagcagccaggctgagatggagttcagcgagggcttcctgaaggctcaggccagcctgcggggccagtactggaccctccaatcatgggtaccggagatgcaggaccctcagtcctggaagggaaaggaaggaacctctagagggcccttcgaacaaaaactcatctcagaagaggatctgaatatgcataccggtcatcatcaccatcaccat

SEQ ID NO: 95 - DNA, 4359 bp, Artificial Sequence
  Nucleotide sequence corresponding to Human ADAMTS13 protein with a single point mutation P1182V
atgcaccagcgtcacccccgggcaagatgccctcccctctgtgtggccggaatccttgcctgtggctttctcctgggctgctggggaccctcccatttccagcagagctgtcttcaggctttggagccacaggccgtgtcttcttacttgagccctggtgctcccttaaaaggccgccctccttcccctggcttccagaggcagaggcagaggcagaggcgggctgcaggcggcatcctacacctggagctgctggtggccgtgggccccgatgtcttccaggctcaccaggaggacacagagcgctatgtgctcaccaacctcaacatcggggcagaactgcttcgggacccgtccctgggggctcagtttcgggtgcacctggtgaagatggtcattctgacagagcctgagggtgctccaaatatcacagccaacctcacctcgtccctgctgagcgtctgtgggtggagccagaccatcaaccctgaggacgacacggatcctggccatgctgacctggtcctctatatcactaggtttgacctggagttgcctgatggtaaccggcaggtgcggggcgtcacccagctgggcggtgcctgctccccaacctggagctgcctcattaccgaggacactggcttcgacctgggagtcaccattgcccatgagattgggcacagcttcggcctggagcacgacggcgcgcccggcagcggctgcggccccagcggacacgtgatggcttcggacggcgccgcgccccgcgccggcctcgcctggtccccctgcagccgccggcagctgctgagcctgctcagcgcaggacgggcgcgctgcgtgtgggacccgccgcggcctcaacccgggtccgcggggcacccgccggatgcgcagcctggcctctactacagcgccaacgagcagtgccgcgtggccttcggccccaaggctgtcgcctgcaccttcgccagggagcacctggatatgtgccaggccctctcctgccacacagacccgctggaccaaagcagctgcagccgcctcctcgttcctctcctggatgggacagaatgtggcgtggagaagtggtgctccaaaggtcgctgccgctccctggtggagctgacccccatagcagcagtgcatgggcgctggtctagctggggtccccgaagtccttgctcccgctcctgcggaggaggtgtggtcaccaggaggcggcagtgcaacaaccccagacctgcctttggggggcgtgcatgtgttggtgctgacctccaggccgagatgtgcaacactcaggcctgcgagaagacccagctggagttcatgtcgcaacagtgcgccaggaccgacggccagccgctgcgctcctcccctggcggcgcctccttctaccactggggtgctgctgtaccacacagccaaggggatgctctgtgcagacacatgtgccgggccattggcgagagcttcatcatgaagcgtggagacagcttcctcgatgggacccggtgtatgccaagtggcccccgggaggacgggaccctgagcctgtgtgtgtcgggcagctgcaggacatttggctgtgatggtaggatggactcccagcaggtatgggacaggtgccaggtgtgtggtggggacaacagcacgtgcagcccacggaagggctctttcacagctggcagagcgagagaatatgtcacgtttctgacagttacccccaacctgaccagtgtctacattgccaaccacaggcctctcttcacacacttggcggtgaggatcggagggcgctatgtcgtggctgggaagatgagcatctcccctaacaccacctacccctccctcctggaggatggtcgtgtcgagtacagagtggccctcaccgaggaccggctgccccgcctggaggagatccgcatctggggacccctccaggaagatgctgacatccaggtttacaggcggtatggcgaggagtatggcaacctcacccgcccagacatcaccttcacctacttccagcctaagccacggcaggcctgggtgtgggccgctgtgcgtgggccctgctcggtgagctgtggggcagggctgcgctgggtaaactacagctgcctggaccaggccaggaaggagttggtggagactgtccagtgccaagggagccagcagccaccagcgtggccagaggcctgcgtgctcgaaccctgccctccctactgggcggtgggagacttcggcccatgcagcgcctcctgtgggggtggcctgcgggagcggccagtgcgctgcgtggaggcccagggcagcctcctgaagacattgcccccagcccggtgcagagcaggggcccagcagccagctgtggcgctggaaacctgcaacccccagccctgccctgccaggtgggaggtgtcagagcccagctcatgcacatcagctggtggagcaggcctggccttggagaacgagacctgtgtgccaggggcagatggcctggaggctccagtgactgaggggcctggctccgtagatgagaagctgcctgcccctgagccctgtgtcgggatgtcatgtcctccaggctggggccatctggatgccacctctgcaggggagaaggctccctccccatggggcagcatcaggacgggggctcaagctgcacacgtgtggacccctgcggcagggtcgtgctccgtctcctgcgggcgaggtctgatggagctccgtttcctgtgcatggactctgccctcagggtgcctgtccaggaagagctgtgtggcctggcaagcaagcctgggagccggcgggaggtctgccaggctgtcccgtgccctgctcggtggcagtacaagctggcggcctgcagcgtgagctgtgggagaggggtcgtgcggaggatcctgtattgtgcccgggcccatggggaggacgatggtgaggagatcctgttggacacccagtgccaggggctgcctcgcccggaaccccaggaggcctgcagcctggagccctgcccacctaggtggaaagtcatgtcccttggcccatgttcggccagctgtggccttggcactgctagacgctcggtggcctgtgtgcagctcgaccaaggccaggacgtggaggtggacgaggcggcctgtgcggcgctggtgcggcccgaggccagtgtcccctgtctcattgccgactgcacctaccgctggcatgttggcacctggatggagtgctctgtttcctgtggggatggcatccagcgccggcgtgacacctgcctcggaccccaggcccaggcgcctgtgccagctgatttctgccagcacttgcccaagccggtgactgtgcgtggctgctgggctgggccctgtgtgggacagggtacgcccagcctggtgccccacgaagaagccgctgctccaggacggaccacagccacccctgctggtgcctccctggagtggtcccaggcccggggcctgctcttctccccggctccccagcctcggcggctcctgcccggggtgcaggaaaactcagtgcagtccagtgcctgtggcaggcagcaccttgagccaacaggaaccattgacatgcgaggcccagggcaggcagactgtgcagtggccattgggcggcccctcggggaggtggtgaccctccgcgtccttgagagttctctcaactgcagtgcgggggacatgttgctgctttggggccggctcacctggaggaagatgtgcaggaagctgttggacatgactttcagctccaagaccaacacgctggtggtgaggcagcgctgcgggcggccaggaggtggggtgctgctgcggtatgggagccagcttgctcctgaaaccttctacagagaatgtgacatgcagctctttgggccctggggtgaaatcgtgagcccctcgctgagtccagccacgagtaatgcagggggctgccggctcttcattaatgtggctccgcacgcacggattgccatccatgccctggccaccaacatgggcgctgggaccgagggagccaatgccagctacatcttgatccgggacacccacagcttgaggaccacagcgttccatgggcagcaggtgctctactgggagtcagagagcagccaggctgagatggagttcagcgagggcttcctgaaggctcaggccagcctgcggggccagtactggaccctccaatcatgggtaccggagatgcaggaccctcagtcctggaagggaaaggaaggaacctctagagggcccttcgaacaaaaactcatctcagaagaggatctgaatatgcataccggtcatcatcaccatcaccat

SEQ ID NO: 96 - protein, 1453 aa, Artificial Sequence
  Human ADAMTS13 protein with a single point mutation A1144K
MHQRHPRARCPPLCVAGILACGFLLGCWGPSHFQQSCLQALEPQAVSSYLSPGAPLKGRPPSPGFQRQRQRQRRAAGGILHLELLVAVGPDVFQAHQEDTERYVLTNLNIGAELLRDPSLGAQFRVHLVKMVILTEPEGAPNITANLTSSLLSVCGWSQTINPEDDTDPGHADLVLYITRFDLELPDGNRQVRGVTQLGGACSPTWSCLITEDTGFDLGVTIAHEIGHSFGLEHDGAPGSGCGPSGHVMASDGAAPRAGLAWSPCSRRQLLSLLSAGRARCVWDPPRPQPGSAGHPPDAQPGLYYSANEQCRVAFGPKAVACTFAREHLDMCQALSCHTDPLDQSSCSRLLVPLLDGTECGVEKWCSKGRCRSLVELTPIAAVHGRWSSWGPRSPCSRSCGGGVVTRRRQCNNPRPAFGGRACVGADLQAEMCNTQACEKTQLEFMSQQCARTDGQPLRSSPGGASFYHWGAAVPHSQGDALCRHMCRAIGESFIMKRGDSFLDGTRCMPSGPREDGTLSLCVSGSCRTFGCDGRMDSQQVWDRCQVCGGDNSTCSPRKGSFTAGRAREYVTFLTVTPNLTSVYIANHRPLFTHLAVRIGGRYVVAGKMSISPNTTYPSLLEDGRVEYRVALTEDRLPRLEEIRIWGPLQEDADIQVYRRYGEEYGNLTRPDITFTYFQPKPRQAWVWAAVRGPCSVSCGAGLRWVNYSCLDQARKELVETVQCQGSQQPPAWPEACVLEPCPPYWAVGDFGPCSASCGGGLRERPVRCVEAQGSLLKTLPPARCRAGAQQPAVALETCNPQPCPARWEVSEPSSCTSAGGAGLALENETCVPGADGLEAPVTEGPGSVDEKLPAPEPCVGMSCPPGWGHLDATSAGEKAPSPWGSIRTGAQAAHVWTPAAGSCSVSCGRGLMELRFLCMDSALRVPVQEELCGLASKPGSRREVCQAVPCPARWQYKLAACSVSCGRGVVRRILYCARAHGEDDGEEILLDTQCQGLPRPEPQEACSLEPCPPRWKVMSLGPCSASCGLGTARRSVACVQLDQGQDVEVDEAACAALVRPEASVPCLIADCTYRWHVGTWMECSVSCGDGIQRRRDTCLGPQAQAPVPADFCQHLPKPVTVRGCWAGPCVGQGTPSLVPHEEKAAPGRTTATPAGASLEWSQARGLLFSPAPQPRRLLPGPQENSVQSSACGRQHLEPTGTIDMRGPGQADCAVAIGRPLGEVVTLRVLESSLNCSAGDMLLLWGRLTWRKMCRKLLDMTFSSKTNTLVVRQRCGRPGGGVLLRYGSQLAPETFYRECDMQLFGPWGEIVSPSLSPATSNAGGCRLFINVAPHARIAIHALATNMGAGTEGANASYILIRDTHSLRTTAFHGQQVLYWESESSQAEMEFSEGFLKAQASLRGQYWTLQSWVPEMQDPQSWKGKEGTSRGPFEQKLISEEDLNMHTGHHHHHH

SEQ ID NO: 97 - protein, 1453 aa, Artificial Sequence
  Human ADAMTS13 protein with a single point mutation A1144I
MHQRHPRARCPPLCVAGILACGFLLGCWGPSHFQQSCLQALEPQAVSSYLSPGAPLKGRPPSPGFQRQRQRQRRAAGGILHLELLVAVGPDVFQAHQEDTERYVLTNLNIGAELLRDPSLGAQFRVHLVKMVILTEPEGAPNITANLTSSLLSVCGWSQTINPEDDTDPGHADLVLYITRFDLELPDGNRQVRGVTQLGGACSPTWSCLITEDTGFDLGVTIAHEIGHSFGLEHDGAPGSGCGPSGHVMASDGAAPRAGLAWSPCSRRQLLSLLSAGRARCVWDPPRPQPGSAGHPPDAQPGLYYSANEQCRVAFGPKAVACTFAREHLDMCQALSCHTDPLDQSSCSRLLVPLLDGTECGVEKWCSKGRCRSLVELTPIAAVHGRWSSWGPRSPCSRSCGGGVVTRRRQCNNPRPAFGGRACVGADLQAEMCNTQACEKTQLEFMSQQCARTDGQPLRSSPGGASFYHWGAAVPHSQGDALCRHMCRAIGESFIMKRGDSFLDGTRCMPSGPREDGTLSLCVSGSCRTFGCDGRMDSQQVWDRCQVCGGDNSTCSPRKGSFTAGRAREYVTFLTVTPNLTSVYIANHRPLFTHLAVRIGGRYVVAGKMSISPNTTYPSLLEDGRVEYRVALTEDRLPRLEEIRIWGPLQEDADIQVYRRYGEEYGNLTRPDITFTYFQPKPRQAWVWAAVRGPCSVSCGAGLRWVNYSCLDQARKELVETVQCQGSQQPPAWPEACVLEPCPPYWAVGDFGPCSASCGGGLRERPVRCVEAQGSLLKTLPPARCRAGAQQPAVALETCNPQPCPARWEVSEPSSCTSAGGAGLALENETCVPGADGLEAPVTEGPGSVDEKLPAPEPCVGMSCPPGWGHLDATSAGEKAPSPWGSIRTGAQAAHVWTPAAGSCSVSCGRGLMELRFLCMDSALRVPVQEELCGLASKPGSRREVCQAVPCPARWQYKLAACSVSCGRGVVRRILYCARAHGEDDGEEILLDTQCQGLPRPEPQEACSLEPCPPRWKVMSLGPCSASCGLGTARRSVACVQLDQGQDVEVDEAACAALVRPEASVPCLIADCTYRWHVGTWMECSVSCGDGIQRRRDTCLGPQAQAPVPADFCQHLPKPVTVRGCWAGPCVGQGTPSLVPHEEIAAPGRTTATPAGASLEWSQARGLLFSPAPQPRRLLPGPQENSVQSSACGRQHLEPTGTIDMRGPGQADCAVAIGRPLGEVVTLRVLESSLNCSAGDMLLLWGRLTWRKMCRKLLDMTFSSKTNTLVVRQRCGRPGGGVLLRYGSQLAPETFYRECDMQLFGPWGEIVSPSLSPATSNAGGCRLFINVAPHARIAIHALATNMGAGTEGANASYILIRDTHSLRTTAFHGQQVLYWESESSQAEMEFSEGFLKAQASLRGQYWTLQSWVPEMQDPQSWKGKEGTSRGPFEQKLISEEDLNMHTGHHHHHH

SEQ ID NO: 98 - protein, 1453 aa, Artificial Sequence
  Human ADAMTS13 protein with a single point mutation A1145K
MHQRHPRARCPPLCVAGILACGFLLGCWGPSHFQQSCLQALEPQAVSSYLSPGAPLKGRPPSPGFQRQRQRQRRAAGGILHLELLVAVGPDVFQAHQEDTERYVLTNLNIGAELLRDPSLGAQFRVHLVKMVILTEPEGAPNITANLTSSLLSVCGWSQTINPEDDTDPGHADLVLYITRFDLELPDGNRQVRGVTQLGGACSPTWSCLITEDTGFDLGVTIAHEIGHSFGLEHDGAPGSGCGPSGHVMASDGAAPRAGLAWSPCSRRQLLSLLSAGRARCVWDPPRPQPGSAGHPPDAQPGLYYSANEQCRVAFGPKAVACTFAREHLDMCQALSCHTDPLDQSSCSRLLVPLLDGTECGVEKWCSKGRCRSLVELTPIAAVHGRWSSWGPRSPCSRSCGGGVVTRRRQCNNPRPAFGGRACVGADLQAEMCNTQACEKTQLEFMSQQCARTDGQPLRSSPGGASFYHWGAAVPHSQGDALCRHMCRAIGESFIMKRGDSFLDGTRCMPSGPREDGTLSLCVSGSCRTFGCDGRMDSQQVWDRCQVCGGDNSTCSPRKGSFTAGRAREYVTFLTVTPNLTSVYIANHRPLFTHLAVRIGGRYVVAGKMSISPNTTYPSLLEDGRVEYRVALTEDRLPRLEEIRIWGPLQEDADIQVYRRYGEEYGNLTRPDITFTYFQPKPRQAWVWAAVRGPCSVSCGAGLRWVNYSCLDQARKELVETVQCQGSQQPPAWPEACVLEPCPPYWAVGDFGPCSASCGGGLRERPVRCVEAQGSLLKTLPPARCRAGAQQPAVALETCNPQPCPARWEVSEPSSCTSAGGAGLALENETCVPGADGLEAPVTEGPGSVDEKLPAPEPCVGMSCPPGWGHLDATSAGEKAPSPWGSIRTGAQAAHVWTPAAGSCSVSCGRGLMELRFLCMDSALRVPVQEELCGLASKPGSRREVCQAVPCPARWQYKLAACSVSCGRGVVRRILYCARAHGEDDGEEILLDTQCQGLPRPEPQEACSLEPCPPRWKVMSLGPCSASCGLGTARRSVACVQLDQGQDVEVDEAACAALVRPEASVPCLIADCTYRWHVGTWMECSVSCGDGIQRRRDTCLGPQAQAPVPADFCQHLPKPVTVRGCWAGPCVGQGTPSLVPHEEAKAPGRTTATPAGASLEWSQARGLLFSPAPQPRRLLPGPQENSVQSSACGRQHLEPTGTIDMRGPGQADCAVAIGRPLGEVVTLRVLESSLNCSAGDMLLLWGRLTWRKMCRKLLDMTFSSKTNTLVVRQRCGRPGGGVLLRYGSQLAPETFYRECDMQLFGPWGEIVSPSLSPATSNAGGCRLFINVAPHARIAIHALATNMGAGTEGANASYILIRDTHSLRTTAFHGQQVLYWESESSQAEMEFSEGFLKAQASLRGQYWTLQSWVPEMQDPQSWKGKEGTSRGPFEQKLISEEDLNMHTGHHHHHH

SEQ ID NO: 99 - protein, 1453 aa, Artificial Sequence
  Human ADAMTS13 protein with a single point mutation A1145I
MHQRHPRARCPPLCVAGILACGFLLGCWGPSHFQQSCLQALEPQAVSSYLSPGAPLKGRPPSPGFQRQRQRQRRAAGGILHLELLVAVGPDVFQAHQEDTERYVLTNLNIGAELLRDPSLGAQFRVHLVKMVILTEPEGAPNITANLTSSLLSVCGWSQTINPEDDTDPGHADLVLYITRFDLELPDGNRQVRGVTQLGGACSPTWSCLITEDTGFDLGVTIAHEIGHSFGLEHDGAPGSGCGPSGHVMASDGAAPRAGLAWSPCSRRQLLSLLSAGRARCVWDPPRPQPGSAGHPPDAQPGLYYSANEQCRVAFGPKAVACTFAREHLDMCQALSCHTDPLDQSSCSRLLVPLLDGTECGVEKWCSKGRCRSLVELTPIAAVHGRWSSWGPRSPCSRSCGGGVVTRRRQCNNPRPAFGGRACVGADLQAEMCNTQACEKTQLEFMSQQCARTDGQPLRSSPGGASFYHWGAAVPHSQGDALCRHMCRAIGESFIMKRGDSFLDGTRCMPSGPREDGTLSLCVSGSCRTFGCDGRMDSQQVWDRCQVCGGDNSTCSPRKGSFTAGRAREYVTFLTVTPNLTSVYIANHRPLFTHLAVRIGGRYVVAGKMSISPNTTYPSLLEDGRVEYRVALTEDRLPRLEEIRIWGPLQEDADIQVYRRYGEEYGNLTRPDITFTYFQPKPRQAWVWAAVRGPCSVSCGAGLRWVNYSCLDQARKELVETVQCQGSQQPPAWPEACVLEPCPPYWAVGDFGPCSASCGGGLRERPVRCVEAQGSLLKTLPPARCRAGAQQPAVALETCNPQPCPARWEVSEPSSCTSAGGAGLALENETCVPGADGLEAPVTEGPGSVDEKLPAPEPCVGMSCPPGWGHLDATSAGEKAPSPWGSIRTGAQAAHVWTPAAGSCSVSCGRGLMELRFLCMDSALRVPVQEELCGLASKPGSRREVCQAVPCPARWQYKLAACSVSCGRGVVRRILYCARAHGEDDGEEILLDTQCQGLPRPEPQEACSLEPCPPRWKVMSLGPCSASCGLGTARRSVACVQLDQGQDVEVDEAACAALVRPEASVPCLIADCTYRWHVGTWMECSVSCGDGIQRRRDTCLGPQAQAPVPADFCQHLPKPVTVRGCWAGPCVGQGTPSLVPHEEAIAPGRTTATPAGASLEWSQARGLLFSPAPQPRRLLPGPQENSVQSSACGRQHLEPTGTIDMRGPGQADCAVAIGRPLGEVVTLRVLESSLNCSAGDMLLLWGRLTWRKMCRKLLDMTFSSKTNTLVVRQRCGRPGGGVLLRYGSQLAPETFYRECDMQLFGPWGEIVSPSLSPATSNAGGCRLFINVAPHARIAIHALATNMGAGTEGANASYILIRDTHSLRTTAFHGQQVLYWESESSQAEMEFSEGFLKAQASLRGQYWTLQSWVPEMQDPQSWKGKEGTSRGPFEQKLISEEDLNMHTGHHHHHH

SEQ ID NO: 100 - protein, 1453 aa, Artificial Sequence
  Human ADAMTS13 protein with a single point mutation A1146K
MHQRHPRARCPPLCVAGILACGFLLGCWGPSHFQQSCLQALEPQAVSSYLSPGAPLKGRPPSPGFQRQRQRQRRAAGGILHLELLVAVGPDVFQAHQEDTERYVLTNLNIGAELLRDPSLGAQFRVHLVKMVILTEPEGAPNITANLTSSLLSVCGWSQTINPEDDTDPGHADLVLYITRFDLELPDGNRQVRGVTQLGGACSPTWSCLITEDTGFDLGVTIAHEIGHSFGLEHDGAPGSGCGPSGHVMASDGAAPRAGLAWSPCSRRQLLSLLSAGRARCVWDPPRPQPGSAGHPPDAQPGLYYSANEQCRVAFGPKAVACTFAREHLDMCQALSCHTDPLDQSSCSRLLVPLLDGTECGVEKWCSKGRCRSLVELTPIAAVHGRWSSWGPRSPCSRSCGGGVVTRRRQCNNPRPAFGGRACVGADLQAEMCNTQACEKTQLEFMSQQCARTDGQPLRSSPGGASFYHWGAAVPHSQGDALCRHMCRAIGESFIMKRGDSFLDGTRCMPSGPREDGTLSLCVSGSCRTFGCDGRMDSQQVWDRCQVCGGDNSTCSPRKGSFTAGRAREYVTFLTVTPNLTSVYIANHRPLFTHLAVRIGGRYVVAGKMSISPNTTYPSLLEDGRVEYRVALTEDRLPRLEEIRIWGPLQEDADIQVYRRYGEEYGNLTRPDITFTYFQPKPRQAWVWAAVRGPCSVSCGAGLRWVNYSCLDQARKELVETVQCQGSQQPPAWPEACVLEPCPPYWAVGDFGPCSASCGGGLRERPVRCVEAQGSLLKTLPPARCRAGAQQPAVALETCNPQPCPARWEVSEPSSCTSAGGAGLALENETCVPGADGLEAPVTEGPGSVDEKLPAPEPCVGMSCPPGWGHLDATSAGEKAPSPWGSIRTGAQAAHVWTPAAGSCSVSCGRGLMELRFLCMDSALRVPVQEELCGLASKPGSRREVCQAVPCPARWQYKLAACSVSCGRGVVRRILYCARAHGEDDGEEILLDTQCQGLPRPEPQEACSLEPCPPRWKVMSLGPCSASCGLGTARRSVACVQLDQGQDVEVDEAACAALVRPEASVPCLIADCTYRWHVGTWMECSVSCGDGIQRRRDTCLGPQAQAPVPADFCQHLPKPVTVRGCWAGPCVGQGTPSLVPHEEAAKPGRTTATPAGASLEWSQARGLLFSPAPQPRRLLPGPQENSVQSSACGRQHLEPTGTIDMRGPGQADCAVAIGRPLGEVVTLRVLESSLNCSAGDMLLLWGRLTWRKMCRKLLDMTFSSKTNTLVVRQRCGRPGGGVLLRYGSQLAPETFYRECDMQLFGPWGEIVSPSLSPATSNAGGCRLFINVAPHARIAIHALATNMGAGTEGANASYILIRDTHSLRTTAFHGQQVLYWESESSQAEMEFSEGFLKAQASLRGQYWTLQSWVPEMQDPQSWKGKEGTSRGPFEQKLISEEDLNMHTGHHHHHH

SEQ ID NO: 101 - protein, 1453 aa, Artificial Sequence
  Human ADAMTS13 protein with a single point mutation A1146I
MHQRHPRARCPPLCVAGILACGFLLGCWGPSHFQQSCLQALEPQAVSSYLSPGAPLKGRPPSPGFQRQRQRQRRAAGGILHLELLVAVGPDVFQAHQEDTERYVLTNLNIGAELLRDPSLGAQFRVHLVKMVILTEPEGAPNITANLTSSLLSVCGWSQTINPEDDTDPGHADLVLYITRFDLELPDGNRQVRGVTQLGGACSPTWSCLITEDTGFDLGVTIAHEIGHSFGLEHDGAPGSGCGPSGHVMASDGAAPRAGLAWSPCSRRQLLSLLSAGRARCVWDPPRPQPGSAGHPPDAQPGLYYSANEQCRVAFGPKAVACTFAREHLDMCQALSCHTDPLDQSSCSRLLVPLLDGTECGVEKWCSKGRCRSLVELTPIAAVHGRWSSWGPRSPCSRSCGGGVVTRRRQCNNPRPAFGGRACVGADLQAEMCNTQACEKTQLEFMSQQCARTDGQPLRSSPGGASFYHWGAAVPHSQGDALCRHMCRAIGESFIMKRGDSFLDGTRCMPSGPREDGTLSLCVSGSCRTFGCDGRMDSQQVWDRCQVCGGDNSTCSPRKGSFTAGRAREYVTFLTVTPNLTSVYIANHRPLFTHLAVRIGGRYVVAGKMSISPNTTYPSLLEDGRVEYRVALTEDRLPRLEEIRIWGPLQEDADIQVYRRYGEEYGNLTRPDITFTYFQPKPRQAWVWAAVRGPCSVSCGAGLRWVNYSCLDQARKELVETVQCQGSQQPPAWPEACVLEPCPPYWAVGDFGPCSASCGGGLRERPVRCVEAQGSLLKTLPPARCRAGAQQPAVALETCNPQPCPARWEVSEPSSCTSAGGAGLALENETCVPGADGLEAPVTEGPGSVDEKLPAPEPCVGMSCPPGWGHLDATSAGEKAPSPWGSIRTGAQAAHVWTPAAGSCSVSCGRGLMELRFLCMDSALRVPVQEELCGLASKPGSRREVCQAVPCPARWQYKLAACSVSCGRGVVRRILYCARAHGEDDGEEILLDTQCQGLPRPEPQEACSLEPCPPRWKVMSLGPCSASCGLGTARRSVACVQLDQGQDVEVDEAACAALVRPEASVPCLIADCTYRWHVGTWMECSVSCGDGIQRRRDTCLGPQAQAPVPADFCQHLPKPVTVRGCWAGPCVGQGTPSLVPHEEAAIPGRTTATPAGASLEWSQARGLLFSPAPQPRRLLPGPQENSVQSSACGRQHLEPTGTIDMRGPGQADCAVAIGRPLGEVVTLRVLESSLNCSAGDMLLLWGRLTWRKMCRKLLDMTFSSKTNTLVVRQRCGRPGGGVLLRYGSQLAPETFYRECDMQLFGPWGEIVSPSLSPATSNAGGCRLFINVAPHARIAIHALATNMGAGTEGANASYILIRDTHSLRTTAFHGQQVLYWESESSQAEMEFSEGFLKAQASLRGQYWTLQSWVPEMQDPQSWKGKEGTSRGPFEQKLISEEDLNMHTGHHHHHH

SEQ ID NO: 102 - protein, 1453 aa, Artificial Sequence
  Human ADAMTS13 protein with a single point mutation P1147K
MHQRHPRARCPPLCVAGILACGFLLGCWGPSHFQQSCLQALEPQAVSSYLSPGAPLKGRPPSPGFQRQRQRQRRAAGGILHLELLVAVGPDVFQAHQEDTERYVLTNLNIGAELLRDPSLGAQFRVHLVKMVILTEPEGAPNITANLTSSLLSVCGWSQTINPEDDTDPGHADLVLYITRFDLELPDGNRQVRGVTQLGGACSPTWSCLITEDTGFDLGVTIAHEIGHSFGLEHDGAPGSGCGPSGHVMASDGAAPRAGLAWSPCSRRQLLSLLSAGRARCVWDPPRPQPGSAGHPPDAQPGLYYSANEQCRVAFGPKAVACTFAREHLDMCQALSCHTDPLDQSSCSRLLVPLLDGTECGVEKWCSKGRCRSLVELTPIAAVHGRWSSWGPRSPCSRSCGGGVVTRRRQCNNPRPAFGGRACVGADLQAEMCNTQACEKTQLEFMSQQCARTDGQPLRSSPGGASFYHWGAAVPHSQGDALCRHMCRAIGESFIMKRGDSFLDGTRCMPSGPREDGTLSLCVSGSCRTFGCDGRMDSQQVWDRCQVCGGDNSTCSPRKGSFTAGRAREYVTFLTVTPNLTSVYIANHRPLFTHLAVRIGGRYVVAGKMSISPNTTYPSLLEDGRVEYRVALTEDRLPRLEEIRIWGPLQEDADIQVYRRYGEEYGNLTRPDITFTYFQPKPRQAWVWAAVRGPCSVSCGAGLRWVNYSCLDQARKELVETVQCQGSQQPPAWPEACVLEPCPPYWAVGDFGPCSASCGGGLRERPVRCVEAQGSLLKTLPPARCRAGAQQPAVALETCNPQPCPARWEVSEPSSCTSAGGAGLALENETCVPGADGLEAPVTEGPGSVDEKLPAPEPCVGMSCPPGWGHLDATSAGEKAPSPWGSIRTGAQAAHVWTPAAGSCSVSCGRGLMELRFLCMDSALRVPVQEELCGLASKPGSRREVCQAVPCPARWQYKLAACSVSCGRGVVRRILYCARAHGEDDGEEILLDTQCQGLPRPEPQEACSLEPCPPRWKVMSLGPCSASCGLGTARRSVACVQLDQGQDVEVDEAACAALVRPEASVPCLIADCTYRWHVGTWMECSVSCGDGIQRRRDTCLGPQAQAPVPADFCQHLPKPVTVRGCWAGPCVGQGTPSLVPHEEAAAKGRTTATPAGASLEWSQARGLLFSPAPQPRRLLPGPQENSVQSSACGRQHLEPTGTIDMRGPGQADCAVAIGRPLGEVVTLRVLESSLNCSAGDMLLLWGRLTWRKMCRKLLDMTFSSKTNTLVVRQRCGRPGGGVLLRYGSQLAPETFYRECDMQLFGPWGEIVSPSLSPATSNAGGCRLFINVAPHARIAIHALATNMGAGTEGANASYILIRDTHSLRTTAFHGQQVLYWESESSQAEMEFSEGFLKAQASLRGQYWTLQSWVPEMQDPQSWKGKEGTSRGPFEQKLISEEDLNMHTGHHHHHH

SEQ ID NO: 103 - protein, 1453 aa, Artificial Sequence
  Human ADAMTS13 protein with a single point mutation P1147I
MHQRHPRARCPPLCVAGILACGFLLGCWGPSHFQQSCLQALEPQAVSSYLSPGAPLKGRPPSPGFQRQRQRQRRAAGGILHLELLVAVGPDVFQAHQEDTERYVLTNLNIGAELLRDPSLGAQFRVHLVKMVILTEPEGAPNITANLTSSLLSVCGWSQTINPEDDTDPGHADLVLYITRFDLELPDGNRQVRGVTQLGGACSPTWSCLITEDTGFDLGVTIAHEIGHSFGLEHDGAPGSGCGPSGHVMASDGAAPRAGLAWSPCSRRQLLSLLSAGRARCVWDPPRPQPGSAGHPPDAQPGLYYSANEQCRVAFGPKAVACTFAREHLDMCQALSCHTDPLDQSSCSRLLVPLLDGTECGVEKWCSKGRCRSLVELTPIAAVHGRWSSWGPRSPCSRSCGGGVVTRRRQCNNPRPAFGGRACVGADLQAEMCNTQACEKTQLEFMSQQCARTDGQPLRSSPGGASFYHWGAAVPHSQGDALCRHMCRAIGESFIMKRGDSFLDGTRCMPSGPREDGTLSLCVSGSCRTFGCDGRMDSQQVWDRCQVCGGDNSTCSPRKGSFTAGRAREYVTFLTVTPNLTSVYIANHRPLFTHLAVRIGGRYVVAGKMSISPNTTYPSLLEDGRVEYRVALTEDRLPRLEEIRIWGPLQEDADIQVYRRYGEEYGNLTRPDITFTYFQPKPRQAWVWAAVRGPCSVSCGAGLRWVNYSCLDQARKELVETVQCQGSQQPPAWPEACVLEPCPPYWAVGDFGPCSASCGGGLRERPVRCVEAQGSLLKTLPPARCRAGAQQPAVALETCNPQPCPARWEVSEPSSCTSAGGAGLALENETCVPGADGLEAPVTEGPGSVDEKLPAPEPCVGMSCPPGWGHLDATSAGEKAPSPWGSIRTGAQAAHVWTPAAGSCSVSCGRGLMELRFLCMDSALRVPVQEELCGLASKPGSRREVCQAVPCPARWQYKLAACSVSCGRGVVRRILYCARAHGEDDGEEILLDTQCQGLPRPEPQEACSLEPCPPRWKVMSLGPCSASCGLGTARRSVACVQLDQGQDVEVDEAACAALVRPEASVPCLIADCTYRWHVGTWMECSVSCGDGIQRRRDTCLGPQAQAPVPADFCQHLPKPVTVRGCWAGPCVGQGTPSLVPHEEAAAIGRTTATPAGASLEWSQARGLLFSPAPQPRRLLPGPQENSVQSSACGRQHLEPTGTIDMRGPGQADCAVAIGRPLGEVVTLRVLESSLNCSAGDMLLLWGRLTWRKMCRKLLDMTFSSKTNTLVVRQRCGRPGGGVLLRYGSQLAPETFYRECDMQLFGPWGEIVSPSLSPATSNAGGCRLFINVAPHARIAIHALATNMGAGTEGANASYILIRDTHSLRTTAFHGQQVLYWESESSQAEMEFSEGFLKAQASLRGQYWTLQSWVPEMQDPQSWKGKEGTSRGPFEQKLISEEDLNMHTGHHHHHH

SEQ ID NO: 104 - protein, 1453 aa, Artificial Sequence
  Human ADAMTS13 protein with a single point mutation P1154K
MHQRHPRARCPPLCVAGILACGFLLGCWGPSHFQQSCLQALEPQAVSSYLSPGAPLKGRPPSPGFQRQRQRQRRAAGGILHLELLVAVGPDVFQAHQEDTERYVLTNLNIGAELLRDPSLGAQFRVHLVKMVILTEPEGAPNITANLTSSLLSVCGWSQTINPEDDTDPGHADLVLYITRFDLELPDGNRQVRGVTQLGGACSPTWSCLITEDTGFDLGVTIAHEIGHSFGLEHDGAPGSGCGPSGHVMASDGAAPRAGLAWSPCSRRQLLSLLSAGRARCVWDPPRPQPGSAGHPPDAQPGLYYSANEQCRVAFGPKAVACTFAREHLDMCQALSCHTDPLDQSSCSRLLVPLLDGTECGVEKWCSKGRCRSLVELTPIAAVHGRWSSWGPRSPCSRSCGGGVVTRRRQCNNPRPAFGGRACVGADLQAEMCNTQACEKTQLEFMSQQCARTDGQPLRSSPGGASFYHWGAAVPHSQGDALCRHMCRAIGESFIMKRGDSFLDGTRCMPSGPREDGTLSLCVSGSCRTFGCDGRMDSQQVWDRCQVCGGDNSTCSPRKGSFTAGRAREYVTFLTVTPNLTSVYIANHRPLFTHLAVRIGGRYVVAGKMSISPNTTYPSLLEDGRVEYRVALTEDRLPRLEEIRIWGPLQEDADIQVYRRYGEEYGNLTRPDITFTYFQPKPRQAWVWAAVRGPCSVSCGAGLRWVNYSCLDQARKELVETVQCQGSQQPPAWPEACVLEPCPPYWAVGDFGPCSASCGGGLRERPVRCVEAQGSLLKTLPPARCRAGAQQPAVALETCNPQPCPARWEVSEPSSCTSAGGAGLALENETCVPGADGLEAPVTEGPGSVDEKLPAPEPCVGMSCPPGWGHLDATSAGEKAPSPWGSIRTGAQAAHVWTPAAGSCSVSCGRGLMELRFLCMDSALRVPVQEELCGLASKPGSRREVCQAVPCPARWQYKLAACSVSCGRGVVRRILYCARAHGEDDGEEILLDTQCQGLPRPEPQEACSLEPCPPRWKVMSLGPCSASCGLGTARRSVACVQLDQGQDVEVDEAACAALVRPEASVPCLIADCTYRWHVGTWMECSVSCGDGIQRRRDTCLGPQAQAPVPADFCQHLPKPVTVRGCWAGPCVGQGTPSLVPHEEAAAPGRTTATKAGASLEWSQARGLLFSPAPQPRRLLPGPQENSVQSSACGRQHLEPTGTIDMRGPGQADCAVAIGRPLGEVVTLRVLESSLNCSAGDMLLLWGRLTWRKMCRKLLDMTFSSKTNTLVVRQRCGRPGGGVLLRYGSQLAPETFYRECDMQLFGPWGEIVSPSLSPATSNAGGCRLFINVAPHARIAIHALATNMGAGTEGANASYILIRDTHSLRTTAFHGQQVLYWESESSQAEMEFSEGFLKAQASLRGQYWTLQSWVPEMQDPQSWKGKEGTSRGPFEQKLISEEDLNMHTGHHHHHH

SEQ ID NO: 105 - protein, 1453 aa, Artificial Sequence
  Human ADAMTS13 protein with a single point mutation P1154I
MHQRHPRARCPPLCVAGILACGFLLGCWGPSHFQQSCLQALEPQAVSSYLSPGAPLKGRPPSPGFQRQRQRQRRAAGGILHLELLVAVGPDVFQAHQEDTERYVLTNLNIGAELLRDPSLGAQFRVHLVKMVILTEPEGAPNITANLTSSLLSVCGWSQTINPEDDTDPGHADLVLYITRFDLELPDGNRQVRGVTQLGGACSPTWSCLITEDTGFDLGVTIAHEIGHSFGLEHDGAPGSGCGPSGHVMASDGAAPRAGLAWSPCSRRQLLSLLSAGRARCVWDPPRPQPGSAGHPPDAQPGLYYSANEQCRVAFGPKAVACTFAREHLDMCQALSCHTDPLDQSSCSRLLVPLLDGTECGVEKWCSKGRCRSLVELTPIAAVHGRWSSWGPRSPCSRSCGGGVVTRRRQCNNPRPAFGGRACVGADLQAEMCNTQACEKTQLEFMSQQCARTDGQPLRSSPGGASFYHWGAAVPHSQGDALCRHMCRAIGESFIMKRGDSFLDGTRCMPSGPREDGTLSLCVSGSCRTFGCDGRMDSQQVWDRCQVCGGDNSTCSPRKGSFTAGRAREYVTFLTVTPNLTSVYIANHRPLFTHLAVRIGGRYVVAGKMSISPNTTYPSLLEDGRVEYRVALTEDRLPRLEEIRIWGPLQEDADIQVYRRYGEEYGNLTRPDITFTYFQPKPRQAWVWAAVRGPCSVSCGAGLRWVNYSCLDQARKELVETVQCQGSQQPPAWPEACVLEPCPPYWAVGDFGPCSASCGGGLRERPVRCVEAQGSLLKTLPPARCRAGAQQPAVALETCNPQPCPARWEVSEPSSCTSAGGAGLALENETCVPGADGLEAPVTEGPGSVDEKLPAPEPCVGMSCPPGWGHLDATSAGEKAPSPWGSIRTGAQAAHVWTPAAGSCSVSCGRGLMELRFLCMDSALRVPVQEELCGLASKPGSRREVCQAVPCPARWQYKLAACSVSCGRGVVRRILYCARAHGEDDGEEILLDTQCQGLPRPEPQEACSLEPCPPRWKVMSLGPCSASCGLGTARRSVACVQLDQGQDVEVDEAACAALVRPEASVPCLIADCTYRWHVGTWMECSVSCGDGIQRRRDTCLGPQAQAPVPADFCQHLPKPVTVRGCWAGPCVGQGTPSLVPHEEAAAPGRTTATIAGASLEWSQARGLLFSPAPQPRRLLPGPQENSVQSSACGRQHLEPTGTIDMRGPGQADCAVAIGRPLGEVVTLRVLESSLNCSAGDMLLLWGRLTWRKMCRKLLDMTFSSKTNTLVVRQRCGRPGGGVLLRYGSQLAPETFYRECDMQLFGPWGEIVSPSLSPATSNAGGCRLFINVAPHARIAIHALATNMGAGTEGANASYILIRDTHSLRTTAFHGQQVLYWESESSQAEMEFSEGFLKAQASLRGQYWTLQSWVPEMQDPQSWKGKEGTSRGPFEQKLISEEDLNMHTGHHHHHH

SEQ ID NO: 106 - protein, 1453 aa, Artificial Sequence
  Human ADAMTS13 protein with a single point mutation P1171K
MHQRHPRARCPPLCVAGILACGFLLGCWGPSHFQQSCLQALEPQAVSSYLSPGAPLKGRPPSPGFQRQRQRQRRAAGGILHLELLVAVGPDVFQAHQEDTERYVLTNLNIGAELLRDPSLGAQFRVHLVKMVILTEPEGAPNITANLTSSLLSVCGWSQTINPEDDTDPGHADLVLYITRFDLELPDGNRQVRGVTQLGGACSPTWSCLITEDTGFDLGVTIAHEIGHSFGLEHDGAPGSGCGPSGHVMASDGAAPRAGLAWSPCSRRQLLSLLSAGRARCVWDPPRPQPGSAGHPPDAQPGLYYSANEQCRVAFGPKAVACTFAREHLDMCQALSCHTDPLDQSSCSRLLVPLLDGTECGVEKWCSKGRCRSLVELTPIAAVHGRWSSWGPRSPCSRSCGGGVVTRRRQCNNPRPAFGGRACVGADLQAEMCNTQACEKTQLEFMSQQCARTDGQPLRSSPGGASFYHWGAAVPHSQGDALCRHMCRAIGESFIMKRGDSFLDGTRCMPSGPREDGTLSLCVSGSCRTFGCDGRMDSQQVWDRCQVCGGDNSTCSPRKGSFTAGRAREYVTFLTVTPNLTSVYIANHRPLFTHLAVRIGGRYVVAGKMSISPNTTYPSLLEDGRVEYRVALTEDRLPRLEEIRIWGPLQEDADIQVYRRYGEEYGNLTRPDITFTYFQPKPRQAWVWAAVRGPCSVSCGAGLRWVNYSCLDQARKELVETVQCQGSQQPPAWPEACVLEPCPPYWAVGDFGPCSASCGGGLRERPVRCVEAQGSLLKTLPPARCRAGAQQPAVALETCNPQPCPARWEVSEPSSCTSAGGAGLALENETCVPGADGLEAPVTEGPGSVDEKLPAPEPCVGMSCPPGWGHLDATSAGEKAPSPWGSIRTGAQAAHVWTPAAGSCSVSCGRGLMELRFLCMDSALRVPVQEELCGLASKPGSRREVCQAVPCPARWQYKLAACSVSCGRGVVRRILYCARAHGEDDGEEILLDTQCQGLPRPEPQEACSLEPCPPRWKVMSLGPCSASCGLGTARRSVACVQLDQGQDVEVDEAACAALVRPEASVPCLIADCTYRWHVGTWMECSVSCGDGIQRRRDTCLGPQAQAPVPADFCQHLPKPVTVRGCWAGPCVGQGTPSLVPHEEAAAPGRTTATPAGASLEWSQARGLLFSKAPQPRRLLPGPQENSVQSSACGRQHLEPTGTIDMRGPGQADCAVAIGRPLGEVVTLRVLESSLNCSAGDMLLLWGRLTWRKMCRKLLDMTFSSKTNTLVVRQRCGRPGGGVLLRYGSQLAPETFYRECDMQLFGPWGEIVSPSLSPATSNAGGCRLFINVAPHARIAIHALATNMGAGTEGANASYILIRDTHSLRTTAFHGQQVLYWESESSQAEMEFSEGFLKAQASLRGQYWTLQSWVPEMQDPQSWKGKEGTSRGPFEQKLISEEDLNMHTGHHHHHH

SEQ ID NO: 107 - protein, 1453 aa, Artificial Sequence
  Human ADAMTS13 protein with a single point mutation P1171I
MHQRHPRARCPPLCVAGILACGFLLGCWGPSHFQQSCLQALEPQAVSSYLSPGAPLKGRPPSPGFQRQRQRQRRAAGGILHLELLVAVGPDVFQAHQEDTERYVLTNLNIGAELLRDPSLGAQFRVHLVKMVILTEPEGAPNITANLTSSLLSVCGWSQTINPEDDTDPGHADLVLYITRFDLELPDGNRQVRGVTQLGGACSPTWSCLITEDTGFDLGVTIAHEIGHSFGLEHDGAPGSGCGPSGHVMASDGAAPRAGLAWSPCSRRQLLSLLSAGRARCVWDPPRPQPGSAGHPPDAQPGLYYSANEQCRVAFGPKAVACTFAREHLDMCQALSCHTDPLDQSSCSRLLVPLLDGTECGVEKWCSKGRCRSLVELTPIAAVHGRWSSWGPRSPCSRSCGGGVVTRRRQCNNPRPAFGGRACVGADLQAEMCNTQACEKTQLEFMSQQCARTDGQPLRSSPGGASFYHWGAAVPHSQGDALCRHMCRAIGESFIMKRGDSFLDGTRCMPSGPREDGTLSLCVSGSCRTFGCDGRMDSQQVWDRCQVCGGDNSTCSPRKGSFTAGRAREYVTFLTVTPNLTSVYIANHRPLFTHLAVRIGGRYVVAGKMSISPNTTYPSLLEDGRVEYRVALTEDRLPRLEEIRIWGPLQEDADIQVYRRYGEEYGNLTRPDITFTYFQPKPRQAWVWAAVRGPCSVSCGAGLRWVNYSCLDQARKELVETVQCQGSQQPPAWPEACVLEPCPPYWAVGDFGPCSASCGGGLRERPVRCVEAQGSLLKTLPPARCRAGAQQPAVALETCNPQPCPARWEVSEPSSCTSAGGAGLALENETCVPGADGLEAPVTEGPGSVDEKLPAPEPCVGMSCPPGWGHLDATSAGEKAPSPWGSIRTGAQAAHVWTPAAGSCSVSCGRGLMELRFLCMDSALRVPVQEELCGLASKPGSRREVCQAVPCPARWQYKLAACSVSCGRGVVRRILYCARAHGEDDGEEILLDTQCQGLPRPEPQEACSLEPCPPRWKVMSLGPCSASCGLGTARRSVACVQLDQGQDVEVDEAACAALVRPEASVPCLIADCTYRWHVGTWMECSVSCGDGIQRRRDTCLGPQAQAPVPADFCQHLPKPVTVRGCWAGPCVGQGTPSLVPHEEAAAPGRTTATPAGASLEWSQARGLLFSIAPQPRRLLPGPQENSVQSSACGRQHLEPTGTIDMRGPGQADCAVAIGRPLGEVVTLRVLESSLNCSAGDMLLLWGRLTWRKMCRKLLDMTFSSKTNTLVVRQRCGRPGGGVLLRYGSQLAPETFYRECDMQLFGPWGEIVSPSLSPATSNAGGCRLFINVAPHARIAIHALATNMGAGTEGANASYILIRDTHSLRTTAFHGQQVLYWESESSQAEMEFSEGFLKAQASLRGQYWTLQSWVPEMQDPQSWKGKEGTSRGPFEQKLISEEDLNMHTGHHHHHH

SEQ ID NO: 108 - protein, 1453 aa, Artificial Sequence
  Human ADAMTS13 protein with a single point mutation P1173K
MHQRHPRARCPPLCVAGILACGFLLGCWGPSHFQQSCLQALEPQAVSSYLSPGAPLKGRPPSPGFQRQRQRQRRAAGGILHLELLVAVGPDVFQAHQEDTERYVLTNLNIGAELLRDPSLGAQFRVHLVKMVILTEPEGAPNITANLTSSLLSVCGWSQTINPEDDTDPGHADLVLYITRFDLELPDGNRQVRGVTQLGGACSPTWSCLITEDTGFDLGVTIAHEIGHSFGLEHDGAPGSGCGPSGHVMASDGAAPRAGLAWSPCSRRQLLSLLSAGRARCVWDPPRPQPGSAGHPPDAQPGLYYSANEQCRVAFGPKAVACTFAREHLDMCQALSCHTDPLDQSSCSRLLVPLLDGTECGVEKWCSKGRCRSLVELTPIAAVHGRWSSWGPRSPCSRSCGGGVVTRRRQCNNPRPAFGGRACVGADLQAEMCNTQACEKTQLEFMSQQCARTDGQPLRSSPGGASFYHWGAAVPHSQGDALCRHMCRAIGESFIMKRGDSFLDGTRCMPSGPREDGTLSLCVSGSCRTFGCDGRMDSQQVWDRCQVCGGDNSTCSPRKGSFTAGRAREYVTFLTVTPNLTSVYIANHRPLFTHLAVRIGGRYVVAGKMSISPNTTYPSLLEDGRVEYRVALTEDRLPRLEEIRIWGPLQEDADIQVYRRYGEEYGNLTRPDITFTYFQPKPRQAWVWAAVRGPCSVSCGAGLRWVNYSCLDQARKELVETVQCQGSQQPPAWPEACVLEPCPPYWAVGDFGPCSASCGGGLRERPVRCVEAQGSLLKTLPPARCRAGAQQPAVALETCNPQPCPARWEVSEPSSCTSAGGAGLALENETCVPGADGLEAPVTEGPGSVDEKLPAPEPCVGMSCPPGWGHLDATSAGEKAPSPWGSIRTGAQAAHVWTPAAGSCSVSCGRGLMELRFLCMDSALRVPVQEELCGLASKPGSRREVCQAVPCPARWQYKLAACSVSCGRGVVRRILYCARAHGEDDGEEILLDTQCQGLPRPEPQEACSLEPCPPRWKVMSLGPCSASCGLGTARRSVACVQLDQGQDVEVDEAACAALVRPEASVPCLIADCTYRWHVGTWMECSVSCGDGIQRRRDTCLGPQAQAPVPADFCQHLPKPVTVRGCWAGPCVGQGTPSLVPHEEAAAPGRTTATPAGASLEWSQARGLLFSPAKQPRRLLPGPQENSVQSSACGRQHLEPTGTIDMRGPGQADCAVAIGRPLGEVVTLRVLESSLNCSAGDMLLLWGRLTWRKMCRKLLDMTFSSKTNTLVVRQRCGRPGGGVLLRYGSQLAPETFYRECDMQLFGPWGEIVSPSLSPATSNAGGCRLFINVAPHARIAIHALATNMGAGTEGANASYILIRDTHSLRTTAFHGQQVLYWESESSQAEMEFSEGFLKAQASLRGQYWTLQSWVPEMQDPQSWKGKEGTSRGPFEQKLISEEDLNMHTGHHHHHH

SEQ ID NO: 109 - protein, 1453 aa, Artificial Sequence
  Human ADAMTS13 protein with a single point mutation P1173I
MHQRHPRARCPPLCVAGILACGFLLGCWGPSHFQQSCLQALEPQAVSSYLSPGAPLKGRPPSPGFQRQRQRQRRAAGGILHLELLVAVGPDVFQAHQEDTERYVLTNLNIGAELLRDPSLGAQFRVHLVKMVILTEPEGAPNITANLTSSLLSVCGWSQTINPEDDTDPGHADLVLYITRFDLELPDGNRQVRGVTQLGGACSPTWSCLITEDTGFDLGVTIAHEIGHSFGLEHDGAPGSGCGPSGHVMASDGAAPRAGLAWSPCSRRQLLSLLSAGRARCVWDPPRPQPGSAGHPPDAQPGLYYSANEQCRVAFGPKAVACTFAREHLDMCQALSCHTDPLDQSSCSRLLVPLLDGTECGVEKWCSKGRCRSLVELTPIAAVHGRWSSWGPRSPCSRSCGGGVVTRRRQCNNPRPAFGGRACVGADLQAEMCNTQACEKTQLEFMSQQCARTDGQPLRSSPGGASFYHWGAAVPHSQGDALCRHMCRAIGESFIMKRGDSFLDGTRCMPSGPREDGTLSLCVSGSCRTFGCDGRMDSQQVWDRCQVCGGDNSTCSPRKGSFTAGRAREYVTFLTVTPNLTSVYIANHRPLFTHLAVRIGGRYVVAGKMSISPNTTYPSLLEDGRVEYRVALTEDRLPRLEEIRIWGPLQEDADIQVYRRYGEEYGNLTRPDITFTYFQPKPRQAWVWAAVRGPCSVSCGAGLRWVNYSCLDQARKELVETVQCQGSQQPPAWPEACVLEPCPPYWAVGDFGPCSASCGGGLRERPVRCVEAQGSLLKTLPPARCRAGAQQPAVALETCNPQPCPARWEVSEPSSCTSAGGAGLALENETCVPGADGLEAPVTEGPGSVDEKLPAPEPCVGMSCPPGWGHLDATSAGEKAPSPWGSIRTGAQAAHVWTPAAGSCSVSCGRGLMELRFLCMDSALRVPVQEELCGLASKPGSRREVCQAVPCPARWQYKLAACSVSCGRGVVRRILYCARAHGEDDGEEILLDTQCQGLPRPEPQEACSLEPCPPRWKVMSLGPCSASCGLGTARRSVACVQLDQGQDVEVDEAACAALVRPEASVPCLIADCTYRWHVGTWMECSVSCGDGIQRRRDTCLGPQAQAPVPADFCQHLPKPVTVRGCWAGPCVGQGTPSLVPHEEAAAPGRTTATPAGASLEWSQARGLLFSPAIQPRRLLPGPQENSVQSSACGRQHLEPTGTIDMRGPGQADCAVAIGRPLGEVVTLRVLESSLNCSAGDMLLLWGRLTWRKMCRKLLDMTFSSKTNTLVVRQRCGRPGGGVLLRYGSQLAPETFYRECDMQLFGPWGEIVSPSLSPATSNAGGCRLFINVAPHARIAIHALATNMGAGTEGANASYILIRDTHSLRTTAFHGQQVLYWESESSQAEMEFSEGFLKAQASLRGQYWTLQSWVPEMQDPQSWKGKEGTSRGPFEQKLISEEDLNMHTGHHHHHH

SEQ ID NO: 110 - protein, 1453 aa, Artificial Sequence
  Human ADAMTS13 protein with a single point mutation P1175K
MHQRHPRARCPPLCVAGILACGFLLGCWGPSHFQQSCLQALEPQAVSSYLSPGAPLKGRPPSPGFQRQRQRQRRAAGGILHLELLVAVGPDVFQAHQEDTERYVLTNLNIGAELLRDPSLGAQFRVHLVKMVILTEPEGAPNITANLTSSLLSVCGWSQTINPEDDTDPGHADLVLYITRFDLELPDGNRQVRGVTQLGGACSPTWSCLITEDTGFDLGVTIAHEIGHSFGLEHDGAPGSGCGPSGHVMASDGAAPRAGLAWSPCSRRQLLSLLSAGRARCVWDPPRPQPGSAGHPPDAQPGLYYSANEQCRVAFGPKAVACTFAREHLDMCQALSCHTDPLDQSSCSRLLVPLLDGTECGVEKWCSKGRCRSLVELTPIAAVHGRWSSWGPRSPCSRSCGGGVVTRRRQCNNPRPAFGGRACVGADLQAEMCNTQACEKTQLEFMSQQCARTDGQPLRSSPGGASFYHWGAAVPHSQGDALCRHMCRAIGESFIMKRGDSFLDGTRCMPSGPREDGTLSLCVSGSCRTFGCDGRMDSQQVWDRCQVCGGDNSTCSPRKGSFTAGRAREYVTFLTVTPNLTSVYIANHRPLFTHLAVRIGGRYVVAGKMSISPNTTYPSLLEDGRVEYRVALTEDRLPRLEEIRIWGPLQEDADIQVYRRYGEEYGNLTRPDITFTYFQPKPRQAWVWAAVRGPCSVSCGAGLRWVNYSCLDQARKELVETVQCQGSQQPPAWPEACVLEPCPPYWAVGDFGPCSASCGGGLRERPVRCVEAQGSLLKTLPPARCRAGAQQPAVALETCNPQPCPARWEVSEPSSCTSAGGAGLALENETCVPGADGLEAPVTEGPGSVDEKLPAPEPCVGMSCPPGWGHLDATSAGEKAPSPWGSIRTGAQAAHVWTPAAGSCSVSCGRGLMELRFLCMDSALRVPVQEELCGLASKPGSRREVCQAVPCPARWQYKLAACSVSCGRGVVRRILYCARAHGEDDGEEILLDTQCQGLPRPEPQEACSLEPCPPRWKVMSLGPCSASCGLGTARRSVACVQLDQGQDVEVDEAACAALVRPEASVPCLIADCTYRWHVGTWMECSVSCGDGIQRRRDTCLGPQAQAPVPADFCQHLPKPVTVRGCWAGPCVGQGTPSLVPHEEAAAPGRTTATPAGASLEWSQARGLLFSPAPQKRRLLPGPQENSVQSSACGRQHLEPTGTIDMRGPGQADCAVAIGRPLGEVVTLRVLESSLNCSAGDMLLLWGRLTWRKMCRKLLDMTFSSKTNTLVVRQRCGRPGGGVLLRYGSQLAPETFYRECDMQLFGPWGEIVSPSLSPATSNAGGCRLFINVAPHARIAIHALATNMGAGTEGANASYILIRDTHSLRTTAFHGQQVLYWESESSQAEMEFSEGFLKAQASLRGQYWTLQSWVPEMQDPQSWKGKEGTSRGPFEQKLISEEDLNMHTGHHHHHH

SEQ ID NO: 111 - protein, 1453 aa, Artificial Sequence
  Human ADAMTS13 protein with a single point mutation P1175I
MHQRHPRARCPPLCVAGILACGFLLGCWGPSHFQQSCLQALEPQAVSSYLSPGAPLKGRPPSPGFQRQRQRQRRAAGGILHLELLVAVGPDVFQAHQEDTERYVLTNLNIGAELLRDPSLGAQFRVHLVKMVILTEPEGAPNITANLTSSLLSVCGWSQTINPEDDTDPGHADLVLYITRFDLELPDGNRQVRGVTQLGGACSPTWSCLITEDTGFDLGVTIAHEIGHSFGLEHDGAPGSGCGPSGHVMASDGAAPRAGLAWSPCSRRQLLSLLSAGRARCVWDPPRPQPGSAGHPPDAQPGLYYSANEQCRVAFGPKAVACTFAREHLDMCQALSCHTDPLDQSSCSRLLVPLLDGTECGVEKWCSKGRCRSLVELTPIAAVHGRWSSWGPRSPCSRSCGGGVVTRRRQCNNPRPAFGGRACVGADLQAEMCNTQACEKTQLEFMSQQCARTDGQPLRSSPGGASFYHWGAAVPHSQGDALCRHMCRAIGESFIMKRGDSFLDGTRCMPSGPREDGTLSLCVSGSCRTFGCDGRMDSQQVWDRCQVCGGDNSTCSPRKGSFTAGRAREYVTFLTVTPNLTSVYIANHRPLFTHLAVRIGGRYVVAGKMSISPNTTYPSLLEDGRVEYRVALTEDRLPRLEEIRIWGPLQEDADIQVYRRYGEEYGNLTRPDITFTYFQPKPRQAWVWAAVRGPCSVSCGAGLRWVNYSCLDQARKELVETVQCQGSQQPPAWPEACVLEPCPPYWAVGDFGPCSASCGGGLRERPVRCVEAQGSLLKTLPPARCRAGAQQPAVALETCNPQPCPARWEVSEPSSCTSAGGAGLALENETCVPGADGLEAPVTEGPGSVDEKLPAPEPCVGMSCPPGWGHLDATSAGEKAPSPWGSIRTGAQAAHVWTPAAGSCSVSCGRGLMELRFLCMDSALRVPVQEELCGLASKPGSRREVCQAVPCPARWQYKLAACSVSCGRGVVRRILYCARAHGEDDGEEILLDTQCQGLPRPEPQEACSLEPCPPRWKVMSLGPCSASCGLGTARRSVACVQLDQGQDVEVDEAACAALVRPEASVPCLIADCTYRWHVGTWMECSVSCGDGIQRRRDTCLGPQAQAPVPADFCQHLPKPVTVRGCWAGPCVGQGTPSLVPHEEAAAPGRTTATPAGASLEWSQARGLLFSPAPQIRRLLPGPQENSVQSSACGRQHLEPTGTIDMRGPGQADCAVAIGRPLGEVVTLRVLESSLNCSAGDMLLLWGRLTWRKMCRKLLDMTFSSKTNTLVVRQRCGRPGGGVLLRYGSQLAPETFYRECDMQLFGPWGEIVSPSLSPATSNAGGCRLFINVAPHARIAIHALATNMGAGTEGANASYILIRDTHSLRTTAFHGQQVLYWESESSQAEMEFSEGFLKAQASLRGQYWTLQSWVPEMQDPQSWKGKEGTSRGPFEQKLISEEDLNMHTGHHHHHH

SEQ ID NO: 112 - protein, 1453 aa, Artificial Sequence
  Human ADAMTS13 protein with a single point mutation P1180K
MHQRHPRARCPPLCVAGILACGFLLGCWGPSHFQQSCLQALEPQAVSSYLSPGAPLKGRPPSPGFQRQRQRQRRAAGGILHLELLVAVGPDVFQAHQEDTERYVLTNLNIGAELLRDPSLGAQFRVHLVKMVILTEPEGAPNITANLTSSLLSVCGWSQTINPEDDTDPGHADLVLYITRFDLELPDGNRQVRGVTQLGGACSPTWSCLITEDTGFDLGVTIAHEIGHSFGLEHDGAPGSGCGPSGHVMASDGAAPRAGLAWSPCSRRQLLSLLSAGRARCVWDPPRPQPGSAGHPPDAQPGLYYSANEQCRVAFGPKAVACTFAREHLDMCQALSCHTDPLDQSSCSRLLVPLLDGTECGVEKWCSKGRCRSLVELTPIAAVHGRWSSWGPRSPCSRSCGGGVVTRRRQCNNPRPAFGGRACVGADLQAEMCNTQACEKTQLEFMSQQCARTDGQPLRSSPGGASFYHWGAAVPHSQGDALCRHMCRAIGESFIMKRGDSFLDGTRCMPSGPREDGTLSLCVSGSCRTFGCDGRMDSQQVWDRCQVCGGDNSTCSPRKGSFTAGRAREYVTFLTVTPNLTSVYIANHRPLFTHLAVRIGGRYVVAGKMSISPNTTYPSLLEDGRVEYRVALTEDRLPRLEEIRIWGPLQEDADIQVYRRYGEEYGNLTRPDITFTYFQPKPRQAWVWAAVRGPCSVSCGAGLRWVNYSCLDQARKELVETVQCQGSQQPPAWPEACVLEPCPPYWAVGDFGPCSASCGGGLRERPVRCVEAQGSLLKTLPPARCRAGAQQPAVALETCNPQPCPARWEVSEPSSCTSAGGAGLALENETCVPGADGLEAPVTEGPGSVDEKLPAPEPCVGMSCPPGWGHLDATSAGEKAPSPWGSIRTGAQAAHVWTPAAGSCSVSCGRGLMELRFLCMDSALRVPVQEELCGLASKPGSRREVCQAVPCPARWQYKLAACSVSCGRGVVRRILYCARAHGEDDGEEILLDTQCQGLPRPEPQEACSLEPCPPRWKVMSLGPCSASCGLGTARRSVACVQLDQGQDVEVDEAACAALVRPEASVPCLIADCTYRWHVGTWMECSVSCGDGIQRRRDTCLGPQAQAPVPADFCQHLPKPVTVRGCWAGPCVGQGTPSLVPHEEAAAPGRTTATPAGASLEWSQARGLLFSPAPQPRRLLKGPQENSVQSSACGRQHLEPTGTIDMRGPGQADCAVAIGRPLGEVVTLRVLESSLNCSAGDMLLLWGRLTWRKMCRKLLDMTFSSKTNTLVVRQRCGRPGGGVLLRYGSQLAPETFYRECDMQLFGPWGEIVSPSLSPATSNAGGCRLFINVAPHARIAIHALATNMGAGTEGANASYILIRDTHSLRTTAFHGQQVLYWESESSQAEMEFSEGFLKAQASLRGQYWTLQSWVPEMQDPQSWKGKEGTSRGPFEQKLISEEDLNMHTGHHHHHH

SEQ ID NO: 113 - protein, 1453 aa, Artificial Sequence
  Human ADAMTS13 protein with a single point mutation P1180I
MHQRHPRARCPPLCVAGILACGFLLGCWGPSHFQQSCLQALEPQAVSSYLSPGAPLKGRPPSPGFQRQRQRQRRAAGGILHLELLVAVGPDVFQAHQEDTERYVLTNLNIGAELLRDPSLGAQFRVHLVKMVILTEPEGAPNITANLTSSLLSVCGWSQTINPEDDTDPGHADLVLYITRFDLELPDGNRQVRGVTQLGGACSPTWSCLITEDTGFDLGVTIAHEIGHSFGLEHDGAPGSGCGPSGHVMASDGAAPRAGLAWSPCSRRQLLSLLSAGRARCVWDPPRPQPGSAGHPPDAQPGLYYSANEQCRVAFGPKAVACTFAREHLDMCQALSCHTDPLDQSSCSRLLVPLLDGTECGVEKWCSKGRCRSLVELTPIAAVHGRWSSWGPRSPCSRSCGGGVVTRRRQCNNPRPAFGGRACVGADLQAEMCNTQACEKTQLEFMSQQCARTDGQPLRSSPGGASFYHWGAAVPHSQGDALCRHMCRAIGESFIMKRGDSFLDGTRCMPSGPREDGTLSLCVSGSCRTFGCDGRMDSQQVWDRCQVCGGDNSTCSPRKGSFTAGRAREYVTFLTVTPNLTSVYIANHRPLFTHLAVRIGGRYVVAGKMSISPNTTYPSLLEDGRVEYRVALTEDRLPRLEEIRIWGPLQEDADIQVYRRYGEEYGNLTRPDITFTYFQPKPRQAWVWAAVRGPCSVSCGAGLRWVNYSCLDQARKELVETVQCQGSQQPPAWPEACVLEPCPPYWAVGDFGPCSASCGGGLRERPVRCVEAQGSLLKTLPPARCRAGAQQPAVALETCNPQPCPARWEVSEPSSCTSAGGAGLALENETCVPGADGLEAPVTEGPGSVDEKLPAPEPCVGMSCPPGWGHLDATSAGEKAPSPWGSIRTGAQAAHVWTPAAGSCSVSCGRGLMELRFLCMDSALRVPVQEELCGLASKPGSRREVCQAVPCPARWQYKLAACSVSCGRGVVRRILYCARAHGEDDGEEILLDTQCQGLPRPEPQEACSLEPCPPRWKVMSLGPCSASCGLGTARRSVACVQLDQGQDVEVDEAACAALVRPEASVPCLIADCTYRWHVGTWMECSVSCGDGIQRRRDTCLGPQAQAPVPADFCQHLPKPVTVRGCWAGPCVGQGTPSLVPHEEAAAPGRTTATPAGASLEWSQARGLLFSPAPQPRRLLIGPQENSVQSSACGRQHLEPTGTIDMRGPGQADCAVAIGRPLGEVVTLRVLESSLNCSAGDMLLLWGRLTWRKMCRKLLDMTFSSKTNTLVVRQRCGRPGGGVLLRYGSQLAPETFYRECDMQLFGPWGEIVSPSLSPATSNAGGCRLFINVAPHARIAIHALATNMGAGTEGANASYILIRDTHSLRTTAFHGQQVLYWESESSQAEMEFSEGFLKAQASLRGQYWTLQSWVPEMQDPQSWKGKEGTSRGPFEQKLISEEDLNMHTGHHHHHH

SEQ ID NO: 114 - protein, 1453 aa, Artificial Sequence
  Human ADAMTS13 protein with a single point mutation P1182K
MHQRHPRARCPPLCVAGILACGFLLGCWGPSHFQQSCLQALEPQAVSSYLSPGAPLKGRPPSPGFQRQRQRQRRAAGGILHLELLVAVGPDVFQAHQEDTERYVLTNLNIGAELLRDPSLGAQFRVHLVKMVILTEPEGAPNITANLTSSLLSVCGWSQTINPEDDTDPGHADLVLYITRFDLELPDGNRQVRGVTQLGGACSPTWSCLITEDTGFDLGVTIAHEIGHSFGLEHDGAPGSGCGPSGHVMASDGAAPRAGLAWSPCSRRQLLSLLSAGRARCVWDPPRPQPGSAGHPPDAQPGLYYSANEQCRVAFGPKAVACTFAREHLDMCQALSCHTDPLDQSSCSRLLVPLLDGTECGVEKWCSKGRCRSLVELTPIAAVHGRWSSWGPRSPCSRSCGGGVVTRRRQCNNPRPAFGGRACVGADLQAEMCNTQACEKTQLEFMSQQCARTDGQPLRSSPGGASFYHWGAAVPHSQGDALCRHMCRAIGESFIMKRGDSFLDGTRCMPSGPREDGTLSLCVSGSCRTFGCDGRMDSQQVWDRCQVCGGDNSTCSPRKGSFTAGRAREYVTFLTVTPNLTSVYIANHRPLFTHLAVRIGGRYVVAGKMSISPNTTYPSLLEDGRVEYRVALTEDRLPRLEEIRIWGPLQEDADIQVYRRYGEEYGNLTRPDITFTYFQPKPRQAWVWAAVRGPCSVSCGAGLRWVNYSCLDQARKELVETVQCQGSQQPPAWPEACVLEPCPPYWAVGDFGPCSASCGGGLRERPVRCVEAQGSLLKTLPPARCRAGAQQPAVALETCNPQPCPARWEVSEPSSCTSAGGAGLALENETCVPGADGLEAPVTEGPGSVDEKLPAPEPCVGMSCPPGWGHLDATSAGEKAPSPWGSIRTGAQAAHVWTPAAGSCSVSCGRGLMELRFLCMDSALRVPVQEELCGLASKPGSRREVCQAVPCPARWQYKLAACSVSCGRGVVRRILYCARAHGEDDGEEILLDTQCQGLPRPEPQEACSLEPCPPRWKVMSLGPCSASCGLGTARRSVACVQLDQGQDVEVDEAACAALVRPEASVPCLIADCTYRWHVGTWMECSVSCGDGIQRRRDTCLGPQAQAPVPADFCQHLPKPVTVRGCWAGPCVGQGTPSLVPHEEAAAPGRTTATPAGASLEWSQARGLLFSPAPQPRRLLPGKQENSVQSSACGRQHLEPTGTIDMRGPGQADCAVAIGRPLGEVVTLRVLESSLNCSAGDMLLLWGRLTWRKMCRKLLDMTFSSKTNTLVVRQRCGRPGGGVLLRYGSQLAPETFYRECDMQLFGPWGEIVSPSLSPATSNAGGCRLFINVAPHARIAIHALATNMGAGTEGANASYILIRDTHSLRTTAFHGQQVLYWESESSQAEMEFSEGFLKAQASLRGQYWTLQSWVPEMQDPQSWKGKEGTSRGPFEQKLISEEDLNMHTGHHHHHH

SEQ ID NO: 115 - protein, 1453 aa, Artificial Sequence
  Human ADAMTS13 protein with a single point mutation P1182I
MHQRHPRARCPPLCVAGILACGFLLGCWGPSHFQQSCLQALEPQAVSSYLSPGAPLKGRPPSPGFQRQRQRQRRAAGGILHLELLVAVGPDVFQAHQEDTERYVLTNLNIGAELLRDPSLGAQFRVHLVKMVILTEPEGAPNITANLTSSLLSVCGWSQTINPEDDTDPGHADLVLYITRFDLELPDGNRQVRGVTQLGGACSPTWSCLITEDTGFDLGVTIAHEIGHSFGLEHDGAPGSGCGPSGHVMASDGAAPRAGLAWSPCSRRQLLSLLSAGRARCVWDPPRPQPGSAGHPPDAQPGLYYSANEQCRVAFGPKAVACTFAREHLDMCQALSCHTDPLDQSSCSRLLVPLLDGTECGVEKWCSKGRCRSLVELTPIAAVHGRWSSWGPRSPCSRSCGGGVVTRRRQCNNPRPAFGGRACVGADLQAEMCNTQACEKTQLEFMSQQCARTDGQPLRSSPGGASFYHWGAAVPHSQGDALCRHMCRAIGESFIMKRGDSFLDGTRCMPSGPREDGTLSLCVSGSCRTFGCDGRMDSQQVWDRCQVCGGDNSTCSPRKGSFTAGRAREYVTFLTVTPNLTSVYIANHRPLFTHLAVRIGGRYVVAGKMSISPNTTYPSLLEDGRVEYRVALTEDRLPRLEEIRIWGPLQEDADIQVYRRYGEEYGNLTRPDITFTYFQPKPRQAWVWAAVRGPCSVSCGAGLRWVNYSCLDQARKELVETVQCQGSQQPPAWPEACVLEPCPPYWAVGDFGPCSASCGGGLRERPVRCVEAQGSLLKTLPPARCRAGAQQPAVALETCNPQPCPARWEVSEPSSCTSAGGAGLALENETCVPGADGLEAPVTEGPGSVDEKLPAPEPCVGMSCPPGWGHLDATSAGEKAPSPWGSIRTGAQAAHVWTPAAGSCSVSCGRGLMELRFLCMDSALRVPVQEELCGLASKPGSRREVCQAVPCPARWQYKLAACSVSCGRGVVRRILYCARAHGEDDGEEILLDTQCQGLPRPEPQEACSLEPCPPRWKVMSLGPCSASCGLGTARRSVACVQLDQGQDVEVDEAACAALVRPEASVPCLIADCTYRWHVGTWMECSVSCGDGIQRRRDTCLGPQAQAPVPADFCQHLPKPVTVRGCWAGPCVGQGTPSLVPHEEAAAPGRTTATPAGASLEWSQARGLLFSPAPQPRRLLPGIQENSVQSSACGRQHLEPTGTIDMRGPGQADCAVAIGRPLGEVVTLRVLESSLNCSAGDMLLLWGRLTWRKMCRKLLDMTFSSKTNTLVVRQRCGRPGGGVLLRYGSQLAPETFYRECDMQLFGPWGEIVSPSLSPATSNAGGCRLFINVAPHARIAIHALATNMGAGTEGANASYILIRDTHSLRTTAFHGQQVLYWESESSQAEMEFSEGFLKAQASLRGQYWTLQSWVPEMQDPQSWKGKEGTSRGPFEQKLISEEDLNMHTGHHHHHH

SEQ ID NO: 116 - DNA, 4359 bp, Artificial Sequence
  Nucleotide sequence corresponding to Human ADAMTS13 protein with a single point mutation A1144K
atgcaccagcgtcacccccgggcaagatgccctcccctctgtgtggccggaatccttgcctgtggctttctcctgggctgctggggaccctcccatttccagcagagctgtcttcaggctttggagccacaggccgtgtcttcttacttgagccctggtgctcccttaaaaggccgccctccttcccctggcttccagaggcagaggcagaggcagaggcgggctgcaggcggcatcctacacctggagctgctggtggccgtgggccccgatgtcttccaggctcaccaggaggacacagagcgctatgtgctcaccaacctcaacatcggggcagaactgcttcgggacccgtccctgggggctcagtttcgggtgcacctggtgaagatggtcattctgacagagcctgagggtgctccaaatatcacagccaacctcacctcgtccctgctgagcgtctgtgggtggagccagaccatcaaccctgaggacgacacggatcctggccatgctgacctggtcctctatatcactaggtttgacctggagttgcctgatggtaaccggcaggtgcggggcgtcacccagctgggcggtgcctgctccccaacctggagctgcctcattaccgaggacactggcttcgacctgggagtcaccattgcccatgagattgggcacagcttcggcctggagcacgacggcgcgcccggcagcggctgcggccccagcggacacgtgatggcttcggacggcgccgcgccccgcgccggcctcgcctggtccccctgcagccgccggcagctgctgagcctgctcagcgcaggacgggcgcgctgcgtgtgggacccgccgcggcctcaacccgggtccgcggggcacccgccggatgcgcagcctggcctctactacagcgccaacgagcagtgccgcgtggccttcggccccaaggctgtcgcctgcaccttcgccagggagcacctggatatgtgccaggccctctcctgccacacagacccgctggaccaaagcagctgcagccgcctcctcgttcctctcctggatgggacagaatgtggcgtggagaagtggtgctccaaaggtcgctgccgctccctggtggagctgacccccatagcagcagtgcatgggcgctggtctagctggggtccccgaagtccttgctcccgctcctgcggaggaggtgtggtcaccaggaggcggcagtgcaacaaccccagacctgcctttggggggcgtgcatgtgttggtgctgacctccaggccgagatgtgcaacactcaggcctgcgagaagacccagctggagttcatgtcgcaacagtgcgccaggaccgacggccagccgctgcgctcctcccctggcggcgcctccttctaccactggggtgctgctgtaccacacagccaaggggatgctctgtgcagacacatgtgccgggccattggcgagagcttcatcatgaagcgtggagacagcttcctcgatgggacccggtgtatgccaagtggcccccgggaggacgggaccctgagcctgtgtgtgtcgggcagctgcaggacatttggctgtgatggtaggatggactcccagcaggtatgggacaggtgccaggtgtgtggtggggacaacagcacgtgcagcccacggaagggctctttcacagctggcagagcgagagaatatgtcacgtttctgacagttacccccaacctgaccagtgtctacattgccaaccacaggcctctcttcacacacttggcggtgaggatcggagggcgctatgtcgtggctgggaagatgagcatctcccctaacaccacctacccctccctcctggaggatggtcgtgtcgagtacagagtggccctcaccgaggaccggctgccccgcctggaggagatccgcatctggggacccctccaggaagatgctgacatccaggtttacaggcggtatggcgaggagtatggcaacctcacccgcccagacatcaccttcacctacttccagcctaagccacggcaggcctgggtgtgggccgctgtgcgtgggccctgctcggtgagctgtggggcagggctgcgctgggtaaactacagctgcctggaccaggccaggaaggagttggtggagactgtccagtgccaagggagccagcagccaccagcgtggccagaggcctgcgtgctcgaaccctgccctccctactgggcggtgggagacttcggcccatgcagcgcctcctgtgggggtggcctgcgggagcggccagtgcgctgcgtggaggcccagggcagcctcctgaagacattgcccccagcccggtgcagagcaggggcccagcagccagctgtggcgctggaaacctgcaacccccagccctgccctgccaggtgggaggtgtcagagcccagctcatgcacatcagctggtggagcaggcctggccttggagaacgagacctgtgtgccaggggcagatggcctggaggctccagtgactgaggggcctggctccgtagatgagaagctgcctgcccctgagccctgtgtcgggatgtcatgtcctccaggctggggccatctggatgccacctctgcaggggagaaggctccctccccatggggcagcatcaggacgggggctcaagctgcacacgtgtggacccctgcggcagggtcgtgctccgtctcctgcgggcgaggtctgatggagctccgtttcctgtgcatggactctgccctcagggtgcctgtccaggaagagctgtgtggcctggcaagcaagcctgggagccggcgggaggtctgccaggctgtcccgtgccctgctcggtggcagtacaagctggcggcctgcagcgtgagctgtgggagaggggtcgtgcggaggatcctgtattgtgcccgggcccatggggaggacgatggtgaggagatcctgttggacacccagtgccaggggctgcctcgcccggaaccccaggaggcctgcagcctggagccctgcccacctaggtggaaagtcatgtcccttggcccatgttcggccagctgtggccttggcactgctagacgctcggtggcctgtgtgcagctcgaccaaggccaggacgtggaggtggacgaggcggcctgtgcggcgctggtgcggcccgaggccagtgtcccctgtctcattgccgactgcacctaccgctggcatgttggcacctggatggagtgctctgtttcctgtggggatggcatccagcgccggcgtgacacctgcctcggaccccaggcccaggcgcctgtgccagctgatttctgccagcacttgcccaagccggtgactgtgcgtggctgctgggctgggccctgtgtgggacagggtacgcccagcctggtgccccacgaagaaaaggctgctccaggacggaccacagccacccctgctggtgcctccctggagtggtcccaggcccggggcctgctcttctccccggctccccagcctcggcggctcctgcccgggccccaggaaaactcagtgcagtccagtgcctgtggcaggcagcaccttgagccaacaggaaccattgacatgcgaggcccagggcaggcagactgtgcagtggccattgggcggcccctcggggaggtggtgaccctccgcgtccttgagagttctctcaactgcagtgcgggggacatgttgctgctttggggccggctcacctggaggaagatgtgcaggaagctgttggacatgactttcagctccaagaccaacacgctggtggtgaggcagcgctgcgggcggccaggaggtggggtgctgctgcggtatgggagccagcttgctcctgaaaccttctacagagaatgtgacatgcagctctttgggccctggggtgaaatcgtgagcccctcgctgagtccagccacgagtaatgcagggggctgccggctcttcattaatgtggctccgcacgcacggattgccatccatgccctggccaccaacatgggcgctgggaccgagggagccaatgccagctacatcttgatccgggacacccacagcttgaggaccacagcgttccatgggcagcaggtgctctactgggagtcagagagcagccaggctgagatggagttcagcgagggcttcctgaaggctcaggccagcctgcggggccagtactggaccctccaatcatgggtaccggagatgcaggaccctcagtcctggaagggaaaggaaggaacctctagagggcccttcgaacaaaaactcatctcagaagaggatctgaatatgcataccggtcatcatcaccatcaccat

SEQ ID NO: 117 - DNA, 4359 bp, Artificial Sequence
  Nucleotide sequence corresponding to Human ADAMTS13 protein with a single point mutation A1144I
atgcaccagcgtcacccccgggcaagatgccctcccctctgtgtggccggaatccttgcctgtggctttctcctgggctgctggggaccctcccatttccagcagagctgtcttcaggctttggagccacaggccgtgtcttcttacttgagccctggtgctcccttaaaaggccgccctccttcccctggcttccagaggcagaggcagaggcagaggcgggctgcaggcggcatcctacacctggagctgctggtggccgtgggccccgatgtcttccaggctcaccaggaggacacagagcgctatgtgctcaccaacctcaacatcggggcagaactgcttcgggacccgtccctgggggctcagtttcgggtgcacctggtgaagatggtcattctgacagagcctgagggtgctccaaatatcacagccaacctcacctcgtccctgctgagcgtctgtgggtggagccagaccatcaaccctgaggacgacacggatcctggccatgctgacctggtcctctatatcactaggtttgacctggagttgcctgatggtaaccggcaggtgcggggcgtcacccagctgggcggtgcctgctccccaacctggagctgcctcattaccgaggacactggcttcgacctgggagtcaccattgcccatgagattgggcacagcttcggcctggagcacgacggcgcgcccggcagcggctgcggccccagcggacacgtgatggcttcggacggcgccgcgccccgcgccggcctcgcctggtccccctgcagccgccggcagctgctgagcctgctcagcgcaggacgggcgcgctgcgtgtgggacccgccgcggcctcaacccgggtccgcggggcacccgccggatgcgcagcctggcctctactacagcgccaacgagcagtgccgcgtggccttcggccccaaggctgtcgcctgcaccttcgccagggagcacctggatatgtgccaggccctctcctgccacacagacccgctggaccaaagcagctgcagccgcctcctcgttcctctcctggatgggacagaatgtggcgtggagaagtggtgctccaaaggtcgctgccgctccctggtggagctgacccccatagcagcagtgcatgggcgctggtctagctggggtccccgaagtccttgctcccgctcctgcggaggaggtgtggtcaccaggaggcggcagtgcaacaaccccagacctgcctttggggggcgtgcatgtgttggtgctgacctccaggccgagatgtgcaacactcaggcctgcgagaagacccagctggagttcatgtcgcaacagtgcgccaggaccgacggccagccgctgcgctcctcccctggcggcgcctccttctaccactggggtgctgctgtaccacacagccaaggggatgctctgtgcagacacatgtgccgggccattggcgagagcttcatcatgaagcgtggagacagcttcctcgatgggacccggtgtatgccaagtggcccccgggaggacgggaccctgagcctgtgtgtgtcgggcagctgcaggacatttggctgtgatggtaggatggactcccagcaggtatgggacaggtgccaggtgtgtggtggggacaacagcacgtgcagcccacggaagggctctttcacagctggcagagcgagagaatatgtcacgtttctgacagttacccccaacctgaccagtgtctacattgccaaccacaggcctctcttcacacacttggcggtgaggatcggagggcgctatgtcgtggctgggaagatgagcatctcccctaacaccacctacccctccctcctggaggatggtcgtgtcgagtacagagtggccctcaccgaggaccggctgccccgcctggaggagatccgcatctggggacccctccaggaagatgctgacatccaggtttacaggcggtatggcgaggagtatggcaacctcacccgcccagacatcaccttcacctacttccagcctaagccacggcaggcctgggtgtgggccgctgtgcgtgggccctgctcggtgagctgtggggcagggctgcgctgggtaaactacagctgcctggaccaggccaggaaggagttggtggagactgtccagtgccaagggagccagcagccaccagcgtggccagaggcctgcgtgctcgaaccctgccctccctactgggcggtgggagacttcggcccatgcagcgcctcctgtgggggtggcctgcgggagcggccagtgcgctgcgtggaggcccagggcagcctcctgaagacattgcccccagcccggtgcagagcaggggcccagcagccagctgtggcgctggaaacctgcaacccccagccctgccctgccaggtgggaggtgtcagagcccagctcatgcacatcagctggtggagcaggcctggccttggagaacgagacctgtgtgccaggggcagatggcctggaggctccagtgactgaggggcctggctccgtagatgagaagctgcctgcccctgagccctgtgtcgggatgtcatgtcctccaggctggggccatctggatgccacctctgcaggggagaaggctccctccccatggggcagcatcaggacgggggctcaagctgcacacgtgtggacccctgcggcagggtcgtgctccgtctcctgcgggcgaggtctgatggagctccgtttcctgtgcatggactctgccctcagggtgcctgtccaggaagagctgtgtggcctggcaagcaagcctgggagccggcgggaggtctgccaggctgtcccgtgccctgctcggtggcagtacaagctggcggcctgcagcgtgagctgtgggagaggggtcgtgcggaggatcctgtattgtgcccgggcccatggggaggacgatggtgaggagatcctgttggacacccagtgccaggggctgcctcgcccggaaccccaggaggcctgcagcctggagccctgcccacctaggtggaaagtcatgtcccttggcccatgttcggccagctgtggccttggcactgctagacgctcggtggcctgtgtgcagctcgaccaaggccaggacgtggaggtggacgaggcggcctgtgcggcgctggtgcggcccgaggccagtgtcccctgtctcattgccgactgcacctaccgctggcatgttggcacctggatggagtgctctgtttcctgtggggatggcatccagcgccggcgtgacacctgcctcggaccccaggcccaggcgcctgtgccagctgatttctgccagcacttgcccaagccggtgactgtgcgtggctgctgggctgggccctgtgtgggacagggtacgcccagcctggtgccccacgaagaaattgctgctccaggacggaccacagccacccctgctggtgcctccctggagtggtcccaggcccggggcctgctcttctccccggctccccagcctcggcggctcctgcccgggccccaggaaaactcagtgcagtccagtgcctgtggcaggcagcaccttgagccaacaggaaccattgacatgcgaggcccagggcaggcagactgtgcagtggccattgggcggcccctcggggaggtggtgaccctccgcgtccttgagagttctctcaactgcagtgcgggggacatgttgctgctttggggccggctcacctggaggaagatgtgcaggaagctgttggacatgactttcagctccaagaccaacacgctggtggtgaggcagcgctgcgggcggccaggaggtggggtgctgctgcggtatgggagccagcttgctcctgaaaccttctacagagaatgtgacatgcagctctttgggccctggggtgaaatcgtgagcccctcgctgagtccagccacgagtaatgcagggggctgccggctcttcattaatgtggctccgcacgcacggattgccatccatgccctggccaccaacatgggcgctgggaccgagggagccaatgccagctacatcttgatccgggacacccacagcttgaggaccacagcgttccatgggcagcaggtgctctactgggagtcagagagcagccaggctgagatggagttcagcgagggcttcctgaaggctcaggccagcctgcggggccagtactggaccctccaatcatgggtaccggagatgcaggaccctcagtcctggaagggaaaggaaggaacctctagagggcccttcgaacaaaaactcatctcagaagaggatctgaatatgcataccggtcatcatcaccatcaccat

SEQ ID NO: 118 - DNA, 4359 bp, Artificial Sequence
  Nucleotide sequence corresponding to Human ADAMTS13 protein with a single point mutation A1145K
atgcaccagcgtcacccccgggcaagatgccctcccctctgtgtggccggaatccttgcctgtggctttctcctgggctgctggggaccctcccatttccagcagagctgtcttcaggctttggagccacaggccgtgtcttcttacttgagccctggtgctcccttaaaaggccgccctccttcccctggcttccagaggcagaggcagaggcagaggcgggctgcaggcggcatcctacacctggagctgctggtggccgtgggccccgatgtcttccaggctcaccaggaggacacagagcgctatgtgctcaccaacctcaacatcggggcagaactgcttcgggacccgtccctgggggctcagtttcgggtgcacctggtgaagatggtcattctgacagagcctgagggtgctccaaatatcacagccaacctcacctcgtccctgctgagcgtctgtgggtggagccagaccatcaaccctgaggacgacacggatcctggccatgctgacctggtcctctatatcactaggtttgacctggagttgcctgatggtaaccggcaggtgcggggcgtcacccagctgggcggtgcctgctccccaacctggagctgcctcattaccgaggacactggcttcgacctgggagtcaccattgcccatgagattgggcacagcttcggcctggagcacgacggcgcgcccggcagcggctgcggccccagcggacacgtgatggcttcggacggcgccgcgccccgcgccggcctcgcctggtccccctgcagccgccggcagctgctgagcctgctcagcgcaggacgggcgcgctgcgtgtgggacccgccgcggcctcaacccgggtccgcggggcacccgccggatgcgcagcctggcctctactacagcgccaacgagcagtgccgcgtggccttcggccccaaggctgtcgcctgcaccttcgccagggagcacctggatatgtgccaggccctctcctgccacacagacccgctggaccaaagcagctgcagccgcctcctcgttcctctcctggatgggacagaatgtggcgtggagaagtggtgctccaaaggtcgctgccgctccctggtggagctgacccccatagcagcagtgcatgggcgctggtctagctggggtccccgaagtccttgctcccgctcctgcggaggaggtgtggtcaccaggaggcggcagtgcaacaaccccagacctgcctttggggggcgtgcatgtgttggtgctgacctccaggccgagatgtgcaacactcaggcctgcgagaagacccagctggagttcatgtcgcaacagtgcgccaggaccgacggccagccgctgcgctcctcccctggcggcgcctccttctaccactggggtgctgctgtaccacacagccaaggggatgctctgtgcagacacatgtgccgggccattggcgagagcttcatcatgaagcgtggagacagcttcctcgatgggacccggtgtatgccaagtggcccccgggaggacgggaccctgagcctgtgtgtgtcgggcagctgcaggacatttggctgtgatggtaggatggactcccagcaggtatgggacaggtgccaggtgtgtggtggggacaacagcacgtgcagcccacggaagggctctttcacagctggcagagcgagagaatatgtcacgtttctgacagttacccccaacctgaccagtgtctacattgccaaccacaggcctctcttcacacacttggcggtgaggatcggagggcgctatgtcgtggctgggaagatgagcatctcccctaacaccacctacccctccctcctggaggatggtcgtgtcgagtacagagtggccctcaccgaggaccggctgccccgcctggaggagatccgcatctggggacccctccaggaagatgctgacatccaggtttacaggcggtatggcgaggagtatggcaacctcacccgcccagacatcaccttcacctacttccagcctaagccacggcaggcctgggtgtgggccgctgtgcgtgggccctgctcggtgagctgtggggcagggctgcgctgggtaaactacagctgcctggaccaggccaggaaggagttggtggagactgtccagtgccaagggagccagcagccaccagcgtggccagaggcctgcgtgctcgaaccctgccctccctactgggcggtgggagacttcggcccatgcagcgcctcctgtgggggtggcctgcgggagcggccagtgcgctgcgtggaggcccagggcagcctcctgaagacattgcccccagcccggtgcagagcaggggcccagcagccagctgtggcgctggaaacctgcaacccccagccctgccctgccaggtgggaggtgtcagagcccagctcatgcacatcagctggtggagcaggcctggccttggagaacgagacctgtgtgccaggggcagatggcctggaggctccagtgactgaggggcctggctccgtagatgagaagctgcctgcccctgagccctgtgtcgggatgtcatgtcctccaggctggggccatctggatgccacctctgcaggggagaaggctccctccccatggggcagcatcaggacgggggctcaagctgcacacgtgtggacccctgcggcagggtcgtgctccgtctcctgcgggcgaggtctgatggagctccgtttcctgtgcatggactctgccctcagggtgcctgtccaggaagagctgtgtggcctggcaagcaagcctgggagccggcgggaggtctgccaggctgtcccgtgccctgctcggtggcagtacaagctggcggcctgcagcgtgagctgtgggagaggggtcgtgcggaggatcctgtattgtgcccgggcccatggggaggacgatggtgaggagatcctgttggacacccagtgccaggggctgcctcgcccggaaccccaggaggcctgcagcctggagccctgcccacctaggtggaaagtcatgtcccttggcccatgttcggccagctgtggccttggcactgctagacgctcggtggcctgtgtgcagctcgaccaaggccaggacgtggaggtggacgaggcggcctgtgcggcgctggtgcggcccgaggccagtgtcccctgtctcattgccgactgcacctaccgctggcatgttggcacctggatggagtgctctgtttcctgtggggatggcatccagcgccggcgtgacacctgcctcggaccccaggcccaggcgcctgtgccagctgatttctgccagcacttgcccaagccggtgactgtgcgtggctgctgggctgggccctgtgtgggacagggtacgcccagcctggtgccccacgaagaagccaaggctccaggacggaccacagccacccctgctggtgcctccctggagtggtcccaggcccggggcctgctcttctccccggctccccagcctcggcggctcctgcccgggccccaggaaaactcagtgcagtccagtgcctgtggcaggcagcaccttgagccaacaggaaccattgacatgcgaggcccagggcaggcagactgtgcagtggccattgggcggcccctcggggaggtggtgaccctccgcgtccttgagagttctctcaactgcagtgcgggggacatgttgctgctttggggccggctcacctggaggaagatgtgcaggaagctgttggacatgactttcagctccaagaccaacacgctggtggtgaggcagcgctgcgggcggccaggaggtggggtgctgctgcggtatgggagccagcttgctcctgaaaccttctacagagaatgtgacatgcagctctttgggccctggggtgaaatcgtgagcccctcgctgagtccagccacgagtaatgcagggggctgccggctcttcattaatgtggctccgcacgcacggattgccatccatgccctggccaccaacatgggcgctgggaccgagggagccaatgccagctacatcttgatccgggacacccacagcttgaggaccacagcgttccatgggcagcaggtgctctactgggagtcagagagcagccaggctgagatggagttcagcgagggcttcctgaaggctcaggccagcctgcggggccagtactggaccctccaatcatgggtaccggagatgcaggaccctcagtcctggaagggaaaggaaggaacctctagagggcccttcgaacaaaaactcatctcagaagaggatctgaatatgcataccggtcatcatcaccatcaccat

SEQ ID NO: 119 - DNA, 4359 bp, Artificial Sequence
  Nucleotide sequence corresponding to Human ADAMTS13 protein with a single point mutation A1145I
atgcaccagcgtcacccccgggcaagatgccctcccctctgtgtggccggaatccttgcctgtggctttctcctgggctgctggggaccctcccatttccagcagagctgtcttcaggctttggagccacaggccgtgtcttcttacttgagccctggtgctcccttaaaaggccgccctccttcccctggcttccagaggcagaggcagaggcagaggcgggctgcaggcggcatcctacacctggagctgctggtggccgtgggccccgatgtcttccaggctcaccaggaggacacagagcgctatgtgctcaccaacctcaacatcggggcagaactgcttcgggacccgtccctgggggctcagtttcgggtgcacctggtgaagatggtcattctgacagagcctgagggtgctccaaatatcacagccaacctcacctcgtccctgctgagcgtctgtgggtggagccagaccatcaaccctgaggacgacacggatcctggccatgctgacctggtcctctatatcactaggtttgacctggagttgcctgatggtaaccggcaggtgcggggcgtcacccagctgggcggtgcctgctccccaacctggagctgcctcattaccgaggacactggcttcgacctgggagtcaccattgcccatgagattgggcacagcttcggcctggagcacgacggcgcgcccggcagcggctgcggccccagcggacacgtgatggcttcggacggcgccgcgccccgcgccggcctcgcctggtccccctgcagccgccggcagctgctgagcctgctcagcgcaggacgggcgcgctgcgtgtgggacccgccgcggcctcaacccgggtccgcggggcacccgccggatgcgcagcctggcctctactacagcgccaacgagcagtgccgcgtggccttcggccccaaggctgtcgcctgcaccttcgccagggagcacctggatatgtgccaggccctctcctgccacacagacccgctggaccaaagcagctgcagccgcctcctcgttcctctcctggatgggacagaatgtggcgtggagaagtggtgctccaaaggtcgctgccgctccctggtggagctgacccccatagcagcagtgcatgggcgctggtctagctggggtccccgaagtccttgctcccgctcctgcggaggaggtgtggtcaccaggaggcggcagtgcaacaaccccagacctgcctttggggggcgtgcatgtgttggtgctgacctccaggccgagatgtgcaacactcaggcctgcgagaagacccagctggagttcatgtcgcaacagtgcgccaggaccgacggccagccgctgcgctcctcccctggcggcgcctccttctaccactggggtgctgctgtaccacacagccaaggggatgctctgtgcagacacatgtgccgggccattggcgagagcttcatcatgaagcgtggagacagcttcctcgatgggacccggtgtatgccaagtggcccccgggaggacgggaccctgagcctgtgtgtgtcgggcagctgcaggacatttggctgtgatggtaggatggactcccagcaggtatgggacaggtgccaggtgtgtggtggggacaacagcacgtgcagcccacggaagggctctttcacagctggcagagcgagagaatatgtcacgtttctgacagttacccccaacctgaccagtgtctacattgccaaccacaggcctctcttcacacacttggcggtgaggatcggagggcgctatgtcgtggctgggaagatgagcatctcccctaacaccacctacccctccctcctggaggatggtcgtgtcgagtacagagtggccctcaccgaggaccggctgccccgcctggaggagatccgcatctggggacccctccaggaagatgctgacatccaggtttacaggcggtatggcgaggagtatggcaacctcacccgcccagacatcaccttcacctacttccagcctaagccacggcaggcctgggtgtgggccgctgtgcgtgggccctgctcggtgagctgtggggcagggctgcgctgggtaaactacagctgcctggaccaggccaggaaggagttggtggagactgtccagtgccaagggagccagcagccaccagcgtggccagaggcctgcgtgctcgaaccctgccctccctactgggcggtgggagacttcggcccatgcagcgcctcctgtgggggtggcctgcgggagcggccagtgcgctgcgtggaggcccagggcagcctcctgaagacattgcccccagcccggtgcagagcaggggcccagcagccagctgtggcgctggaaacctgcaacccccagccctgccctgccaggtgggaggtgtcagagcccagctcatgcacatcagctggtggagcaggcctggccttggagaacgagacctgtgtgccaggggcagatggcctggaggctccagtgactgaggggcctggctccgtagatgagaagctgcctgcccctgagccctgtgtcgggatgtcatgtcctccaggctggggccatctggatgccacctctgcaggggagaaggctccctccccatggggcagcatcaggacgggggctcaagctgcacacgtgtggacccctgcggcagggtcgtgctccgtctcctgcgggcgaggtctgatggagctccgtttcctgtgcatggactctgccctcagggtgcctgtccaggaagagctgtgtggcctggcaagcaagcctgggagccggcgggaggtctgccaggctgtcccgtgccctgctcggtggcagtacaagctggcggcctgcagcgtgagctgtgggagaggggtcgtgcggaggatcctgtattgtgcccgggcccatggggaggacgatggtgaggagatcctgttggacacccagtgccaggggctgcctcgcccggaaccccaggaggcctgcagcctggagccctgcccacctaggtggaaagtcatgtcccttggcccatgttcggccagctgtggccttggcactgctagacgctcggtggcctgtgtgcagctcgaccaaggccaggacgtggaggtggacgaggcggcctgtgcggcgctggtgcggcccgaggccagtgtcccctgtctcattgccgactgcacctaccgctggcatgttggcacctggatggagtgctctgtttcctgtggggatggcatccagcgccggcgtgacacctgcctcggaccccaggcccaggcgcctgtgccagctgatttctgccagcacttgcccaagccggtgactgtgcgtggctgctgggctgggccctgtgtgggacagggtacgcccagcctggtgccccacgaagaagccattgctccaggacggaccacagccacccctgctggtgcctccctggagtggtcccaggcccggggcctgctcttctccccggctccccagcctcggcggctcctgcccgggccccaggaaaactcagtgcagtccagtgcctgtggcaggcagcaccttgagccaacaggaaccattgacatgcgaggcccagggcaggcagactgtgcagtggccattgggcggcccctcggggaggtggtgaccctccgcgtccttgagagttctctcaactgcagtgcgggggacatgttgctgctttggggccggctcacctggaggaagatgtgcaggaagctgttggacatgactttcagctccaagaccaacacgctggtggtgaggcagcgctgcgggcggccaggaggtggggtgctgctgcggtatgggagccagcttgctcctgaaaccttctacagagaatgtgacatgcagctctttgggccctggggtgaaatcgtgagcccctcgctgagtccagccacgagtaatgcagggggctgccggctcttcattaatgtggctccgcacgcacggattgccatccatgccctggccaccaacatgggcgctgggaccgagggagccaatgccagctacatcttgatccgggacacccacagcttgaggaccacagcgttccatgggcagcaggtgctctactgggagtcagagagcagccaggctgagatggagttcagcgagggcttcctgaaggctcaggccagcctgcggggccagtactggaccctccaatcatgggtaccggagatgcaggaccctcagtcctggaagggaaaggaaggaacctctagagggcccttcgaacaaaaactcatctcagaagaggatctgaatatgcataccggtcatcatcaccatcaccat

SEQ ID NO: 120 - DNA, 4359 bp, Artificial Sequence
  Nucleotide sequence corresponding to Human ADAMTS13 protein with a single point mutation A1146K
atgcaccagcgtcacccccgggcaagatgccctcccctctgtgtggccggaatccttgcctgtggctttctcctgggctgctggggaccctcccatttccagcagagctgtcttcaggctttggagccacaggccgtgtcttcttacttgagccctggtgctcccttaaaaggccgccctccttcccctggcttccagaggcagaggcagaggcagaggcgggctgcaggcggcatcctacacctggagctgctggtggccgtgggccccgatgtcttccaggctcaccaggaggacacagagcgctatgtgctcaccaacctcaacatcggggcagaactgcttcgggacccgtccctgggggctcagtttcgggtgcacctggtgaagatggtcattctgacagagcctgagggtgctccaaatatcacagccaacctcacctcgtccctgctgagcgtctgtgggtggagccagaccatcaaccctgaggacgacacggatcctggccatgctgacctggtcctctatatcactaggtttgacctggagttgcctgatggtaaccggcaggtgcggggcgtcacccagctgggcggtgcctgctccccaacctggagctgcctcattaccgaggacactggcttcgacctgggagtcaccattgcccatgagattgggcacagcttcggcctggagcacgacggcgcgcccggcagcggctgcggccccagcggacacgtgatggcttcggacggcgccgcgccccgcgccggcctcgcctggtccccctgcagccgccggcagctgctgagcctgctcagcgcaggacgggcgcgctgcgtgtgggacccgccgcggcctcaacccgggtccgcggggcacccgccggatgcgcagcctggcctctactacagcgccaacgagcagtgccgcgtggccttcggccccaaggctgtcgcctgcaccttcgccagggagcacctggatatgtgccaggccctctcctgccacacagacccgctggaccaaagcagctgcagccgcctcctcgttcctctcctggatgggacagaatgtggcgtggagaagtggtgctccaaaggtcgctgccgctccctggtggagctgacccccatagcagcagtgcatgggcgctggtctagctggggtccccgaagtccttgctcccgctcctgcggaggaggtgtggtcaccaggaggcggcagtgcaacaaccccagacctgcctttggggggcgtgcatgtgttggtgctgacctccaggccgagatgtgcaacactcaggcctgcgagaagacccagctggagttcatgtcgcaacagtgcgccaggaccgacggccagccgctgcgctcctcccctggcggcgcctccttctaccactggggtgctgctgtaccacacagccaaggggatgctctgtgcagacacatgtgccgggccattggcgagagcttcatcatgaagcgtggagacagcttcctcgatgggacccggtgtatgccaagtggcccccgggaggacgggaccctgagcctgtgtgtgtcgggcagctgcaggacatttggctgtgatggtaggatggactcccagcaggtatgggacaggtgccaggtgtgtggtggggacaacagcacgtgcagcccacggaagggctctttcacagctggcagagcgagagaatatgtcacgtttctgacagttacccccaacctgaccagtgtctacattgccaaccacaggcctctcttcacacacttggcggtgaggatcggagggcgctatgtcgtggctgggaagatgagcatctcccctaacaccacctacccctccctcctggaggatggtcgtgtcgagtacagagtggccctcaccgaggaccggctgccccgcctggaggagatccgcatctggggacccctccaggaagatgctgacatccaggtttacaggcggtatggcgaggagtatggcaacctcacccgcccagacatcaccttcacctacttccagcctaagccacggcaggcctgggtgtgggccgctgtgcgtgggccctgctcggtgagctgtggggcagggctgcgctgggtaaactacagctgcctggaccaggccaggaaggagttggtggagactgtccagtgccaagggagccagcagccaccagcgtggccagaggcctgcgtgctcgaaccctgccctccctactgggcggtgggagacttcggcccatgcagcgcctcctgtgggggtggcctgcgggagcggccagtgcgctgcgtggaggcccagggcagcctcctgaagacattgcccccagcccggtgcagagcaggggcccagcagccagctgtggcgctggaaacctgcaacccccagccctgccctgccaggtgggaggtgtcagagcccagctcatgcacatcagctggtggagcaggcctggccttggagaacgagacctgtgtgccaggggcagatggcctggaggctccagtgactgaggggcctggctccgtagatgagaagctgcctgcccctgagccctgtgtcgggatgtcatgtcctccaggctggggccatctggatgccacctctgcaggggagaaggctccctccccatggggcagcatcaggacgggggctcaagctgcacacgtgtggacccctgcggcagggtcgtgctccgtctcctgcgggcgaggtctgatggagctccgtttcctgtgcatggactctgccctcagggtgcctgtccaggaagagctgtgtggcctggcaagcaagcctgggagccggcgggaggtctgccaggctgtcccgtgccctgctcggtggcagtacaagctggcggcctgcagcgtgagctgtgggagaggggtcgtgcggaggatcctgtattgtgcccgggcccatggggaggacgatggtgaggagatcctgttggacacccagtgccaggggctgcctcgcccggaaccccaggaggcctgcagcctggagccctgcccacctaggtggaaagtcatgtcccttggcccatgttcggccagctgtggccttggcactgctagacgctcggtggcctgtgtgcagctcgaccaaggccaggacgtggaggtggacgaggcggcctgtgcggcgctggtgcggcccgaggccagtgtcccctgtctcattgccgactgcacctaccgctggcatgttggcacctggatggagtgctctgtttcctgtggggatggcatccagcgccggcgtgacacctgcctcggaccccaggcccaggcgcctgtgccagctgatttctgccagcacttgcccaagccggtgactgtgcgtggctgctgggctgggccctgtgtgggacagggtacgcccagcctggtgccccacgaagaagccgctaagccaggacggaccacagccacccctgctggtgcctccctggagtggtcccaggcccggggcctgctcttctccccggctccccagcctcggcggctcctgcccgggccccaggaaaactcagtgcagtccagtgcctgtggcaggcagcaccttgagccaacaggaaccattgacatgcgaggcccagggcaggcagactgtgcagtggccattgggcggcccctcggggaggtggtgaccctccgcgtccttgagagttctctcaactgcagtgcgggggacatgttgctgctttggggccggctcacctggaggaagatgtgcaggaagctgttggacatgactttcagctccaagaccaacacgctggtggtgaggcagcgctgcgggcggccaggaggtggggtgctgctgcggtatgggagccagcttgctcctgaaaccttctacagagaatgtgacatgcagctctttgggccctggggtgaaatcgtgagcccctcgctgagtccagccacgagtaatgcagggggctgccggctcttcattaatgtggctccgcacgcacggattgccatccatgccctggccaccaacatgggcgctgggaccgagggagccaatgccagctacatcttgatccgggacacccacagcttgaggaccacagcgttccatgggcagcaggtgctctactgggagtcagagagcagccaggctgagatggagttcagcgagggcttcctgaaggctcaggccagcctgcggggccagtactggaccctccaatcatgggtaccggagatgcaggaccctcagtcctggaagggaaaggaaggaacctctagagggcccttcgaacaaaaactcatctcagaagaggatctgaatatgcataccggtcatcatcaccatcaccat

SEQ ID NO: 121 - DNA, 4359 bp, Artificial Sequence
  Nucleotide sequence corresponding to Human ADAMTS13 protein with a single point mutation A1146I
atgcaccagcgtcacccccgggcaagatgccctcccctctgtgtggccggaatccttgcctgtggctttctcctgggctgctggggaccctcccatttccagcagagctgtcttcaggctttggagccacaggccgtgtcttcttacttgagccctggtgctcccttaaaaggccgccctccttcccctggcttccagaggcagaggcagaggcagaggcgggctgcaggcggcatcctacacctggagctgctggtggccgtgggccccgatgtcttccaggctcaccaggaggacacagagcgctatgtgctcaccaacctcaacatcggggcagaactgcttcgggacccgtccctgggggctcagtttcgggtgcacctggtgaagatggtcattctgacagagcctgagggtgctccaaatatcacagccaacctcacctcgtccctgctgagcgtctgtgggtggagccagaccatcaaccctgaggacgacacggatcctggccatgctgacctggtcctctatatcactaggtttgacctggagttgcctgatggtaaccggcaggtgcggggcgtcacccagctgggcggtgcctgctccccaacctggagctgcctcattaccgaggacactggcttcgacctgggagtcaccattgcccatgagattgggcacagcttcggcctggagcacgacggcgcgcccggcagcggctgcggccccagcggacacgtgatggcttcggacggcgccgcgccccgcgccggcctcgcctggtccccctgcagccgccggcagctgctgagcctgctcagcgcaggacgggcgcgctgcgtgtgggacccgccgcggcctcaacccgggtccgcggggcacccgccggatgcgcagcctggcctctactacagcgccaacgagcagtgccgcgtggccttcggccccaaggctgtcgcctgcaccttcgccagggagcacctggatatgtgccaggccctctcctgccacacagacccgctggaccaaagcagctgcagccgcctcctcgttcctctcctggatgggacagaatgtggcgtggagaagtggtgctccaaaggtcgctgccgctccctggtggagctgacccccatagcagcagtgcatgggcgctggtctagctggggtccccgaagtccttgctcccgctcctgcggaggaggtgtggtcaccaggaggcggcagtgcaacaaccccagacctgcctttggggggcgtgcatgtgttggtgctgacctccaggccgagatgtgcaacactcaggcctgcgagaagacccagctggagttcatgtcgcaacagtgcgccaggaccgacggccagccgctgcgctcctcccctggcggcgcctccttctaccactggggtgctgctgtaccacacagccaaggggatgctctgtgcagacacatgtgccgggccattggcgagagcttcatcatgaagcgtggagacagcttcctcgatgggacccggtgtatgccaagtggcccccgggaggacgggaccctgagcctgtgtgtgtcgggcagctgcaggacatttggctgtgatggtaggatggactcccagcaggtatgggacaggtgccaggtgtgtggtggggacaacagcacgtgcagcccacggaagggctctttcacagctggcagagcgagagaatatgtcacgtttctgacagttacccccaacctgaccagtgtctacattgccaaccacaggcctctcttcacacacttggcggtgaggatcggagggcgctatgtcgtggctgggaagatgagcatctcccctaacaccacctacccctccctcctggaggatggtcgtgtcgagtacagagtggccctcaccgaggaccggctgccccgcctggaggagatccgcatctggggacccctccaggaagatgctgacatccaggtttacaggcggtatggcgaggagtatggcaacctcacccgcccagacatcaccttcacctacttccagcctaagccacggcaggcctgggtgtgggccgctgtgcgtgggccctgctcggtgagctgtggggcagggctgcgctgggtaaactacagctgcctggaccaggccaggaaggagttggtggagactgtccagtgccaagggagccagcagccaccagcgtggccagaggcctgcgtgctcgaaccctgccctccctactgggcggtgggagacttcggcccatgcagcgcctcctgtgggggtggcctgcgggagcggccagtgcgctgcgtggaggcccagggcagcctcctgaagacattgcccccagcccggtgcagagcaggggcccagcagccagctgtggcgctggaaacctgcaacccccagccctgccctgccaggtgggaggtgtcagagcccagctcatgcacatcagctggtggagcaggcctggccttggagaacgagacctgtgtgccaggggcagatggcctggaggctccagtgactgaggggcctggctccgtagatgagaagctgcctgcccctgagccctgtgtcgggatgtcatgtcctccaggctggggccatctggatgccacctctgcaggggagaaggctccctccccatggggcagcatcaggacgggggctcaagctgcacacgtgtggacccctgcggcagggtcgtgctccgtctcctgcgggcgaggtctgatggagctccgtttcctgtgcatggactctgccctcagggtgcctgtccaggaagagctgtgtggcctggcaagcaagcctgggagccggcgggaggtctgccaggctgtcccgtgccctgctcggtggcagtacaagctggcggcctgcagcgtgagctgtgggagaggggtcgtgcggaggatcctgtattgtgcccgggcccatggggaggacgatggtgaggagatcctgttggacacccagtgccaggggctgcctcgcccggaaccccaggaggcctgcagcctggagccctgcccacctaggtggaaagtcatgtcccttggcccatgttcggccagctgtggccttggcactgctagacgctcggtggcctgtgtgcagctcgaccaaggccaggacgtggaggtggacgaggcggcctgtgcggcgctggtgcggcccgaggccagtgtcccctgtctcattgccgactgcacctaccgctggcatgttggcacctggatggagtgctctgtttcctgtggggatggcatccagcgccggcgtgacacctgcctcggaccccaggcccaggcgcctgtgccagctgatttctgccagcacttgcccaagccggtgactgtgcgtggctgctgggctgggccctgtgtgggacagggtacgcccagcctggtgccccacgaagaagccgctattccaggacggaccacagccacccctgctggtgcctccctggagtggtcccaggcccggggcctgctcttctccccggctccccagcctcggcggctcctgcccgggccccaggaaaactcagtgcagtccagtgcctgtggcaggcagcaccttgagccaacaggaaccattgacatgcgaggcccagggcaggcagactgtgcagtggccattgggcggcccctcggggaggtggtgaccctccgcgtccttgagagttctctcaactgcagtgcgggggacatgttgctgctttggggccggctcacctggaggaagatgtgcaggaagctgttggacatgactttcagctccaagaccaacacgctggtggtgaggcagcgctgcgggcggccaggaggtggggtgctgctgcggtatgggagccagcttgctcctgaaaccttctacagagaatgtgacatgcagctctttgggccctggggtgaaatcgtgagcccctcgctgagtccagccacgagtaatgcagggggctgccggctcttcattaatgtggctccgcacgcacggattgccatccatgccctggccaccaacatgggcgctgggaccgagggagccaatgccagctacatcttgatccgggacacccacagcttgaggaccacagcgttccatgggcagcaggtgctctactgggagtcagagagcagccaggctgagatggagttcagcgagggcttcctgaaggctcaggccagcctgcggggccagtactggaccctccaatcatgggtaccggagatgcaggaccctcagtcctggaagggaaaggaaggaacctctagagggcccttcgaacaaaaactcatctcagaagaggatctgaatatgcataccggtcatcatcaccatcaccat

SEQ ID NO: 122 - DNA, 4359 bp, Artificial Sequence
  Nucleotide sequence corresponding to Human ADAMTS13 protein with a single point mutation P1147K
atgcaccagcgtcacccccgggcaagatgccctcccctctgtgtggccggaatccttgcctgtggctttctcctgggctgctggggaccctcccatttccagcagagctgtcttcaggctttggagccacaggccgtgtcttcttacttgagccctggtgctcccttaaaaggccgccctccttcccctggcttccagaggcagaggcagaggcagaggcgggctgcaggcggcatcctacacctggagctgctggtggccgtgggccccgatgtcttccaggctcaccaggaggacacagagcgctatgtgctcaccaacctcaacatcggggcagaactgcttcgggacccgtccctgggggctcagtttcgggtgcacctggtgaagatggtcattctgacagagcctgagggtgctccaaatatcacagccaacctcacctcgtccctgctgagcgtctgtgggtggagccagaccatcaaccctgaggacgacacggatcctggccatgctgacctggtcctctatatcactaggtttgacctggagttgcctgatggtaaccggcaggtgcggggcgtcacccagctgggcggtgcctgctccccaacctggagctgcctcattaccgaggacactggcttcgacctgggagtcaccattgcccatgagattgggcacagcttcggcctggagcacgacggcgcgcccggcagcggctgcggccccagcggacacgtgatggcttcggacggcgccgcgccccgcgccggcctcgcctggtccccctgcagccgccggcagctgctgagcctgctcagcgcaggacgggcgcgctgcgtgtgggacccgccgcggcctcaacccgggtccgcggggcacccgccggatgcgcagcctggcctctactacagcgccaacgagcagtgccgcgtggccttcggccccaaggctgtcgcctgcaccttcgccagggagcacctggatatgtgccaggccctctcctgccacacagacccgctggaccaaagcagctgcagccgcctcctcgttcctctcctggatgggacagaatgtggcgtggagaagtggtgctccaaaggtcgctgccgctccctggtggagctgacccccatagcagcagtgcatgggcgctggtctagctggggtccccgaagtccttgctcccgctcctgcggaggaggtgtggtcaccaggaggcggcagtgcaacaaccccagacctgcctttggggggcgtgcatgtgttggtgctgacctccaggccgagatgtgcaacactcaggcctgcgagaagacccagctggagttcatgtcgcaacagtgcgccaggaccgacggccagccgctgcgctcctcccctggcggcgcctccttctaccactggggtgctgctgtaccacacagccaaggggatgctctgtgcagacacatgtgccgggccattggcgagagcttcatcatgaagcgtggagacagcttcctcgatgggacccggtgtatgccaagtggcccccgggaggacgggaccctgagcctgtgtgtgtcgggcagctgcaggacatttggctgtgatggtaggatggactcccagcaggtatgggacaggtgccaggtgtgtggtggggacaacagcacgtgcagcccacggaagggctctttcacagctggcagagcgagagaatatgtcacgtttctgacagttacccccaacctgaccagtgtctacattgccaaccacaggcctctcttcacacacttggcggtgaggatcggagggcgctatgtcgtggctgggaagatgagcatctcccctaacaccacctacccctccctcctggaggatggtcgtgtcgagtacagagtggccctcaccgaggaccggctgccccgcctggaggagatccgcatctggggacccctccaggaagatgctgacatccaggtttacaggcggtatggcgaggagtatggcaacctcacccgcccagacatcaccttcacctacttccagcctaagccacggcaggcctgggtgtgggccgctgtgcgtgggccctgctcggtgagctgtggggcagggctgcgctgggtaaactacagctgcctggaccaggccaggaaggagttggtggagactgtccagtgccaagggagccagcagccaccagcgtggccagaggcctgcgtgctcgaaccctgccctccctactgggcggtgggagacttcggcccatgcagcgcctcctgtgggggtggcctgcgggagcggccagtgcgctgcgtggaggcccagggcagcctcctgaagacattgcccccagcccggtgcagagcaggggcccagcagccagctgtggcgctggaaacctgcaacccccagccctgccctgccaggtgggaggtgtcagagcccagctcatgcacatcagctggtggagcaggcctggccttggagaacgagacctgtgtgccaggggcagatggcctggaggctccagtgactgaggggcctggctccgtagatgagaagctgcctgcccctgagccctgtgtcgggatgtcatgtcctccaggctggggccatctggatgccacctctgcaggggagaaggctccctccccatggggcagcatcaggacgggggctcaagctgcacacgtgtggacccctgcggcagggtcgtgctccgtctcctgcgggcgaggtctgatggagctccgtttcctgtgcatggactctgccctcagggtgcctgtccaggaagagctgtgtggcctggcaagcaagcctgggagccggcgggaggtctgccaggctgtcccgtgccctgctcggtggcagtacaagctggcggcctgcagcgtgagctgtgggagaggggtcgtgcggaggatcctgtattgtgcccgggcccatggggaggacgatggtgaggagatcctgttggacacccagtgccaggggctgcctcgcccggaaccccaggaggcctgcagcctggagccctgcccacctaggtggaaagtcatgtcccttggcccatgttcggccagctgtggccttggcactgctagacgctcggtggcctgtgtgcagctcgaccaaggccaggacgtggaggtggacgaggcggcctgtgcggcgctggtgcggcccgaggccagtgtcccctgtctcattgccgactgcacctaccgctggcatgttggcacctggatggagtgctctgtttcctgtggggatggcatccagcgccggcgtgacacctgcctcggaccccaggcccaggcgcctgtgccagctgatttctgccagcacttgcccaagccggtgactgtgcgtggctgctgggctgggccctgtgtgggacagggtacgcccagcctggtgccccacgaagaagccgctgctaagggacggaccacagccacccctgctggtgcctccctggagtggtcccaggcccggggcctgctcttctccccggctccccagcctcggcggctcctgcccgggccccaggaaaactcagtgcagtccagtgcctgtggcaggcagcaccttgagccaacaggaaccattgacatgcgaggcccagggcaggcagactgtgcagtggccattgggcggcccctcggggaggtggtgaccctccgcgtccttgagagttctctcaactgcagtgcgggggacatgttgctgctttggggccggctcacctggaggaagatgtgcaggaagctgttggacatgactttcagctccaagaccaacacgctggtggtgaggcagcgctgcgggcggccaggaggtggggtgctgctgcggtatgggagccagcttgctcctgaaaccttctacagagaatgtgacatgcagctctttgggccctggggtgaaatcgtgagcccctcgctgagtccagccacgagtaatgcagggggctgccggctcttcattaatgtggctccgcacgcacggattgccatccatgccctggccaccaacatgggcgctgggaccgagggagccaatgccagctacatcttgatccgggacacccacagcttgaggaccacagcgttccatgggcagcaggtgctctactgggagtcagagagcagccaggctgagatggagttcagcgagggcttcctgaaggctcaggccagcctgcggggccagtactggaccctccaatcatgggtaccggagatgcaggaccctcagtcctggaagggaaaggaaggaacctctagagggcccttcgaacaaaaactcatctcagaagaggatctgaatatgcataccggtcatcatcaccatcaccat

SEQ ID NO: 123 - DNA, 4359 bp, Artificial Sequence
  Nucleotide sequence corresponding to Human ADAMTS13 protein with a single point mutation P1147I
atgcaccagcgtcacccccgggcaagatgccctcccctctgtgtggccggaatccttgcctgtggctttctcctgggctgctggggaccctcccatttccagcagagctgtcttcaggctttggagccacaggccgtgtcttcttacttgagccctggtgctcccttaaaaggccgccctccttcccctggcttccagaggcagaggcagaggcagaggcgggctgcaggcggcatcctacacctggagctgctggtggccgtgggccccgatgtcttccaggctcaccaggaggacacagagcgctatgtgctcaccaacctcaacatcggggcagaactgcttcgggacccgtccctgggggctcagtttcgggtgcacctggtgaagatggtcattctgacagagcctgagggtgctccaaatatcacagccaacctcacctcgtccctgctgagcgtctgtgggtggagccagaccatcaaccctgaggacgacacggatcctggccatgctgacctggtcctctatatcactaggtttgacctggagttgcctgatggtaaccggcaggtgcggggcgtcacccagctgggcggtgcctgctccccaacctggagctgcctcattaccgaggacactggcttcgacctgggagtcaccattgcccatgagattgggcacagcttcggcctggagcacgacggcgcgcccggcagcggctgcggccccagcggacacgtgatggcttcggacggcgccgcgccccgcgccggcctcgcctggtccccctgcagccgccggcagctgctgagcctgctcagcgcaggacgggcgcgctgcgtgtgggacccgccgcggcctcaacccgggtccgcggggcacccgccggatgcgcagcctggcctctactacagcgccaacgagcagtgccgcgtggccttcggccccaaggctgtcgcctgcaccttcgccagggagcacctggatatgtgccaggccctctcctgccacacagacccgctggaccaaagcagctgcagccgcctcctcgttcctctcctggatgggacagaatgtggcgtggagaagtggtgctccaaaggtcgctgccgctccctggtggagctgacccccatagcagcagtgcatgggcgctggtctagctggggtccccgaagtccttgctcccgctcctgcggaggaggtgtggtcaccaggaggcggcagtgcaacaaccccagacctgcctttggggggcgtgcatgtgttggtgctgacctccaggccgagatgtgcaacactcaggcctgcgagaagacccagctggagttcatgtcgcaacagtgcgccaggaccgacggccagccgctgcgctcctcccctggcggcgcctccttctaccactggggtgctgctgtaccacacagccaaggggatgctctgtgcagacacatgtgccgggccattggcgagagcttcatcatgaagcgtggagacagcttcctcgatgggacccggtgtatgccaagtggcccccgggaggacgggaccctgagcctgtgtgtgtcgggcagctgcaggacatttggctgtgatggtaggatggactcccagcaggtatgggacaggtgccaggtgtgtggtggggacaacagcacgtgcagcccacggaagggctctttcacagctggcagagcgagagaatatgtcacgtttctgacagttacccccaacctgaccagtgtctacattgccaaccacaggcctctcttcacacacttggcggtgaggatcggagggcgctatgtcgtggctgggaagatgagcatctcccctaacaccacctacccctccctcctggaggatggtcgtgtcgagtacagagtggccctcaccgaggaccggctgccccgcctggaggagatccgcatctggggacccctccaggaagatgctgacatccaggtttacaggcggtatggcgaggagtatggcaacctcacccgcccagacatcaccttcacctacttccagcctaagccacggcaggcctgggtgtgggccgctgtgcgtgggccctgctcggtgagctgtggggcagggctgcgctgggtaaactacagctgcctggaccaggccaggaaggagttggtggagactgtccagtgccaagggagccagcagccaccagcgtggccagaggcctgcgtgctcgaaccctgccctccctactgggcggtgggagacttcggcccatgcagcgcctcctgtgggggtggcctgcgggagcggccagtgcgctgcgtggaggcccagggcagcctcctgaagacattgcccccagcccggtgcagagcaggggcccagcagccagctgtggcgctggaaacctgcaacccccagccctgccctgccaggtgggaggtgtcagagcccagctcatgcacatcagctggtggagcaggcctggccttggagaacgagacctgtgtgccaggggcagatggcctggaggctccagtgactgaggggcctggctccgtagatgagaagctgcctgcccctgagccctgtgtcgggatgtcatgtcctccaggctggggccatctggatgccacctctgcaggggagaaggctccctccccatggggcagcatcaggacgggggctcaagctgcacacgtgtggacccctgcggcagggtcgtgctccgtctcctgcgggcgaggtctgatggagctccgtttcctgtgcatggactctgccctcagggtgcctgtccaggaagagctgtgtggcctggcaagcaagcctgggagccggcgggaggtctgccaggctgtcccgtgccctgctcggtggcagtacaagctggcggcctgcagcgtgagctgtgggagaggggtcgtgcggaggatcctgtattgtgcccgggcccatggggaggacgatggtgaggagatcctgttggacacccagtgccaggggctgcctcgcccggaaccccaggaggcctgcagcctggagccctgcccacctaggtggaaagtcatgtcccttggcccatgttcggccagctgtggccttggcactgctagacgctcggtggcctgtgtgcagctcgaccaaggccaggacgtggaggtggacgaggcggcctgtgcggcgctggtgcggcccgaggccagtgtcccctgtctcattgccgactgcacctaccgctggcatgttggcacctggatggagtgctctgtttcctgtggggatggcatccagcgccggcgtgacacctgcctcggaccccaggcccaggcgcctgtgccagctgatttctgccagcacttgcccaagccggtgactgtgcgtggctgctgggctgggccctgtgtgggacagggtacgcccagcctggtgccccacgaagaagccgctgctattggacggaccacagccacccctgctggtgcctccctggagtggtcccaggcccggggcctgctcttctccccggctccccagcctcggcggctcctgcccgggccccaggaaaactcagtgcagtccagtgcctgtggcaggcagcaccttgagccaacaggaaccattgacatgcgaggcccagggcaggcagactgtgcagtggccattgggcggcccctcggggaggtggtgaccctccgcgtccttgagagttctctcaactgcagtgcgggggacatgttgctgctttggggccggctcacctggaggaagatgtgcaggaagctgttggacatgactttcagctccaagaccaacacgctggtggtgaggcagcgctgcgggcggccaggaggtggggtgctgctgcggtatgggagccagcttgctcctgaaaccttctacagagaatgtgacatgcagctctttgggccctggggtgaaatcgtgagcccctcgctgagtccagccacgagtaatgcagggggctgccggctcttcattaatgtggctccgcacgcacggattgccatccatgccctggccaccaacatgggcgctgggaccgagggagccaatgccagctacatcttgatccgggacacccacagcttgaggaccacagcgttccatgggcagcaggtgctctactgggagtcagagagcagccaggctgagatggagttcagcgagggcttcctgaaggctcaggccagcctgcggggccagtactggaccctccaatcatgggtaccggagatgcaggaccctcagtcctggaagggaaaggaaggaacctctagagggcccttcgaacaaaaactcatctcagaagaggatctgaatatgcataccggtcatcatcaccatcaccat

SEQ ID NO: 124 - DNA, 4359 bp, Artificial Sequence
  Nucleotide sequence corresponding to Human ADAMTS13 protein with a single point mutation P1154K
atgcaccagcgtcacccccgggcaagatgccctcccctctgtgtggccggaatccttgcctgtggctttctcctgggctgctggggaccctcccatttccagcagagctgtcttcaggctttggagccacaggccgtgtcttcttacttgagccctggtgctcccttaaaaggccgccctccttcccctggcttccagaggcagaggcagaggcagaggcgggctgcaggcggcatcctacacctggagctgctggtggccgtgggccccgatgtcttccaggctcaccaggaggacacagagcgctatgtgctcaccaacctcaacatcggggcagaactgcttcgggacccgtccctgggggctcagtttcgggtgcacctggtgaagatggtcattctgacagagcctgagggtgctccaaatatcacagccaacctcacctcgtccctgctgagcgtctgtgggtggagccagaccatcaaccctgaggacgacacggatcctggccatgctgacctggtcctctatatcactaggtttgacctggagttgcctgatggtaaccggcaggtgcggggcgtcacccagctgggcggtgcctgctccccaacctggagctgcctcattaccgaggacactggcttcgacctgggagtcaccattgcccatgagattgggcacagcttcggcctggagcacgacggcgcgcccggcagcggctgcggccccagcggacacgtgatggcttcggacggcgccgcgccccgcgccggcctcgcctggtccccctgcagccgccggcagctgctgagcctgctcagcgcaggacgggcgcgctgcgtgtgggacccgccgcggcctcaacccgggtccgcggggcacccgccggatgcgcagcctggcctctactacagcgccaacgagcagtgccgcgtggccttcggccccaaggctgtcgcctgcaccttcgccagggagcacctggatatgtgccaggccctctcctgccacacagacccgctggaccaaagcagctgcagccgcctcctcgttcctctcctggatgggacagaatgtggcgtggagaagtggtgctccaaaggtcgctgccgctccctggtggagctgacccccatagcagcagtgcatgggcgctggtctagctggggtccccgaagtccttgctcccgctcctgcggaggaggtgtggtcaccaggaggcggcagtgcaacaaccccagacctgcctttggggggcgtgcatgtgttggtgctgacctccaggccgagatgtgcaacactcaggcctgcgagaagacccagctggagttcatgtcgcaacagtgcgccaggaccgacggccagccgctgcgctcctcccctggcggcgcctccttctaccactggggtgctgctgtaccacacagccaaggggatgctctgtgcagacacatgtgccgggccattggcgagagcttcatcatgaagcgtggagacagcttcctcgatgggacccggtgtatgccaagtggcccccgggaggacgggaccctgagcctgtgtgtgtcgggcagctgcaggacatttggctgtgatggtaggatggactcccagcaggtatgggacaggtgccaggtgtgtggtggggacaacagcacgtgcagcccacggaagggctctttcacagctggcagagcgagagaatatgtcacgtttctgacagttacccccaacctgaccagtgtctacattgccaaccacaggcctctcttcacacacttggcggtgaggatcggagggcgctatgtcgtggctgggaagatgagcatctcccctaacaccacctacccctccctcctggaggatggtcgtgtcgagtacagagtggccctcaccgaggaccggctgccccgcctggaggagatccgcatctggggacccctccaggaagatgctgacatccaggtttacaggcggtatggcgaggagtatggcaacctcacccgcccagacatcaccttcacctacttccagcctaagccacggcaggcctgggtgtgggccgctgtgcgtgggccctgctcggtgagctgtggggcagggctgcgctgggtaaactacagctgcctggaccaggccaggaaggagttggtggagactgtccagtgccaagggagccagcagccaccagcgtggccagaggcctgcgtgctcgaaccctgccctccctactgggcggtgggagacttcggcccatgcagcgcctcctgtgggggtggcctgcgggagcggccagtgcgctgcgtggaggcccagggcagcctcctgaagacattgcccccagcccggtgcagagcaggggcccagcagccagctgtggcgctggaaacctgcaacccccagccctgccctgccaggtgggaggtgtcagagcccagctcatgcacatcagctggtggagcaggcctggccttggagaacgagacctgtgtgccaggggcagatggcctggaggctccagtgactgaggggcctggctccgtagatgagaagctgcctgcccctgagccctgtgtcgggatgtcatgtcctccaggctggggccatctggatgccacctctgcaggggagaaggctccctccccatggggcagcatcaggacgggggctcaagctgcacacgtgtggacccctgcggcagggtcgtgctccgtctcctgcgggcgaggtctgatggagctccgtttcctgtgcatggactctgccctcagggtgcctgtccaggaagagctgtgtggcctggcaagcaagcctgggagccggcgggaggtctgccaggctgtcccgtgccctgctcggtggcagtacaagctggcggcctgcagcgtgagctgtgggagaggggtcgtgcggaggatcctgtattgtgcccgggcccatggggaggacgatggtgaggagatcctgttggacacccagtgccaggggctgcctcgcccggaaccccaggaggcctgcagcctggagccctgcccacctaggtggaaagtcatgtcccttggcccatgttcggccagctgtggccttggcactgctagacgctcggtggcctgtgtgcagctcgaccaaggccaggacgtggaggtggacgaggcggcctgtgcggcgctggtgcggcccgaggccagtgtcccctgtctcattgccgactgcacctaccgctggcatgttggcacctggatggagtgctctgtttcctgtggggatggcatccagcgccggcgtgacacctgcctcggaccccaggcccaggcgcctgtgccagctgatttctgccagcacttgcccaagccggtgactgtgcgtggctgctgggctgggccctgtgtgggacagggtacgcccagcctggtgccccacgaagaagccgctgctccaggacggaccacagccaccaaggctggtgcctccctggagtggtcccaggcccggggcctgctcttctccccggctccccagcctcggcggctcctgcccgggccccaggaaaactcagtgcagtccagtgcctgtggcaggcagcaccttgagccaacaggaaccattgacatgcgaggcccagggcaggcagactgtgcagtggccattgggcggcccctcggggaggtggtgaccctccgcgtccttgagagttctctcaactgcagtgcgggggacatgttgctgctttggggccggctcacctggaggaagatgtgcaggaagctgttggacatgactttcagctccaagaccaacacgctggtggtgaggcagcgctgcgggcggccaggaggtggggtgctgctgcggtatgggagccagcttgctcctgaaaccttctacagagaatgtgacatgcagctctttgggccctggggtgaaatcgtgagcccctcgctgagtccagccacgagtaatgcagggggctgccggctcttcattaatgtggctccgcacgcacggattgccatccatgccctggccaccaacatgggcgctgggaccgagggagccaatgccagctacatcttgatccgggacacccacagcttgaggaccacagcgttccatgggcagcaggtgctctactgggagtcagagagcagccaggctgagatggagttcagcgagggcttcctgaaggctcaggccagcctgcggggccagtactggaccctccaatcatgggtaccggagatgcaggaccctcagtcctggaagggaaaggaaggaacctctagagggcccttcgaacaaaaactcatctcagaagaggatctgaatatgcataccggtcatcatcaccatcaccat

SEQ ID NO: 125 - DNA, 4359 bp, Artificial Sequence
  Nucleotide sequence corresponding to Human ADAMTS13 protein with a single point mutation P1154I
atgcaccagcgtcacccccgggcaagatgccctcccctctgtgtggccggaatccttgcctgtggctttctcctgggctgctggggaccctcccatttccagcagagctgtcttcaggctttggagccacaggccgtgtcttcttacttgagccctggtgctcccttaaaaggccgccctccttcccctggcttccagaggcagaggcagaggcagaggcgggctgcaggcggcatcctacacctggagctgctggtggccgtgggccccgatgtcttccaggctcaccaggaggacacagagcgctatgtgctcaccaacctcaacatcggggcagaactgcttcgggacccgtccctgggggctcagtttcgggtgcacctggtgaagatggtcattctgacagagcctgagggtgctccaaatatcacagccaacctcacctcgtccctgctgagcgtctgtgggtggagccagaccatcaaccctgaggacgacacggatcctggccatgctgacctggtcctctatatcactaggtttgacctggagttgcctgatggtaaccggcaggtgcggggcgtcacccagctgggcggtgcctgctccccaacctggagctgcctcattaccgaggacactggcttcgacctgggagtcaccattgcccatgagattgggcacagcttcggcctggagcacgacggcgcgcccggcagcggctgcggccccagcggacacgtgatggcttcggacggcgccgcgccccgcgccggcctcgcctggtccccctgcagccgccggcagctgctgagcctgctcagcgcaggacgggcgcgctgcgtgtgggacccgccgcggcctcaacccgggtccgcggggcacccgccggatgcgcagcctggcctctactacagcgccaacgagcagtgccgcgtggccttcggccccaaggctgtcgcctgcaccttcgccagggagcacctggatatgtgccaggccctctcctgccacacagacccgctggaccaaagcagctgcagccgcctcctcgttcctctcctggatgggacagaatgtggcgtggagaagtggtgctccaaaggtcgctgccgctccctggtggagctgacccccatagcagcagtgcatgggcgctggtctagctggggtccccgaagtccttgctcccgctcctgcggaggaggtgtggtcaccaggaggcggcagtgcaacaaccccagacctgcctttggggggcgtgcatgtgttggtgctgacctccaggccgagatgtgcaacactcaggcctgcgagaagacccagctggagttcatgtcgcaacagtgcgccaggaccgacggccagccgctgcgctcctcccctggcggcgcctccttctaccactggggtgctgctgtaccacacagccaaggggatgctctgtgcagacacatgtgccgggccattggcgagagcttcatcatgaagcgtggagacagcttcctcgatgggacccggtgtatgccaagtggcccccgggaggacgggaccctgagcctgtgtgtgtcgggcagctgcaggacatttggctgtgatggtaggatggactcccagcaggtatgggacaggtgccaggtgtgtggtggggacaacagcacgtgcagcccacggaagggctctttcacagctggcagagcgagagaatatgtcacgtttctgacagttacccccaacctgaccagtgtctacattgccaaccacaggcctctcttcacacacttggcggtgaggatcggagggcgctatgtcgtggctgggaagatgagcatctcccctaacaccacctacccctccctcctggaggatggtcgtgtcgagtacagagtggccctcaccgaggaccggctgccccgcctggaggagatccgcatctggggacccctccaggaagatgctgacatccaggtttacaggcggtatggcgaggagtatggcaacctcacccgcccagacatcaccttcacctacttccagcctaagccacggcaggcctgggtgtgggccgctgtgcgtgggccctgctcggtgagctgtggggcagggctgcgctgggtaaactacagctgcctggaccaggccaggaaggagttggtggagactgtccagtgccaagggagccagcagccaccagcgtggccagaggcctgcgtgctcgaaccctgccctccctactgggcggtgggagacttcggcccatgcagcgcctcctgtgggggtggcctgcgggagcggccagtgcgctgcgtggaggcccagggcagcctcctgaagacattgcccccagcccggtgcagagcaggggcccagcagccagctgtggcgctggaaacctgcaacccccagccctgccctgccaggtgggaggtgtcagagcccagctcatgcacatcagctggtggagcaggcctggccttggagaacgagacctgtgtgccaggggcagatggcctggaggctccagtgactgaggggcctggctccgtagatgagaagctgcctgcccctgagccctgtgtcgggatgtcatgtcctccaggctggggccatctggatgccacctctgcaggggagaaggctccctccccatggggcagcatcaggacgggggctcaagctgcacacgtgtggacccctgcggcagggtcgtgctccgtctcctgcgggcgaggtctgatggagctccgtttcctgtgcatggactctgccctcagggtgcctgtccaggaagagctgtgtggcctggcaagcaagcctgggagccggcgggaggtctgccaggctgtcccgtgccctgctcggtggcagtacaagctggcggcctgcagcgtgagctgtgggagaggggtcgtgcggaggatcctgtattgtgcccgggcccatggggaggacgatggtgaggagatcctgttggacacccagtgccaggggctgcctcgcccggaaccccaggaggcctgcagcctggagccctgcccacctaggtggaaagtcatgtcccttggcccatgttcggccagctgtggccttggcactgctagacgctcggtggcctgtgtgcagctcgaccaaggccaggacgtggaggtggacgaggcggcctgtgcggcgctggtgcggcccgaggccagtgtcccctgtctcattgccgactgcacctaccgctggcatgttggcacctggatggagtgctctgtttcctgtggggatggcatccagcgccggcgtgacacctgcctcggaccccaggcccaggcgcctgtgccagctgatttctgccagcacttgcccaagccggtgactgtgcgtggctgctgggctgggccctgtgtgggacagggtacgcccagcctggtgccccacgaagaagccgctgctccaggacggaccacagccaccattgctggtgcctccctggagtggtcccaggcccggggcctgctcttctccccggctccccagcctcggcggctcctgcccgggccccaggaaaactcagtgcagtccagtgcctgtggcaggcagcaccttgagccaacaggaaccattgacatgcgaggcccagggcaggcagactgtgcagtggccattgggcggcccctcggggaggtggtgaccctccgcgtccttgagagttctctcaactgcagtgcgggggacatgttgctgctttggggccggctcacctggaggaagatgtgcaggaagctgttggacatgactttcagctccaagaccaacacgctggtggtgaggcagcgctgcgggcggccaggaggtggggtgctgctgcggtatgggagccagcttgctcctgaaaccttctacagagaatgtgacatgcagctctttgggccctggggtgaaatcgtgagcccctcgctgagtccagccacgagtaatgcagggggctgccggctcttcattaatgtggctccgcacgcacggattgccatccatgccctggccaccaacatgggcgctgggaccgagggagccaatgccagctacatcttgatccgggacacccacagcttgaggaccacagcgttccatgggcagcaggtgctctactgggagtcagagagcagccaggctgagatggagttcagcgagggcttcctgaaggctcaggccagcctgcggggccagtactggaccctccaatcatgggtaccggagatgcaggaccctcagtcctggaagggaaaggaaggaacctctagagggcccttcgaacaaaaactcatctcagaagaggatctgaatatgcataccggtcatcatcaccatcaccat

SEQ ID NO: 126 - DNA, 4359 bp, Artificial Sequence
  Nucleotide sequence corresponding to Human ADAMTS13 protein with a single point mutation P1171K
atgcaccagcgtcacccccgggcaagatgccctcccctctgtgtggccggaatccttgcctgtggctttctcctgggctgctggggaccctcccatttccagcagagctgtcttcaggctttggagccacaggccgtgtcttcttacttgagccctggtgctcccttaaaaggccgccctccttcccctggcttccagaggcagaggcagaggcagaggcgggctgcaggcggcatcctacacctggagctgctggtggccgtgggccccgatgtcttccaggctcaccaggaggacacagagcgctatgtgctcaccaacctcaacatcggggcagaactgcttcgggacccgtccctgggggctcagtttcgggtgcacctggtgaagatggtcattctgacagagcctgagggtgctccaaatatcacagccaacctcacctcgtccctgctgagcgtctgtgggtggagccagaccatcaaccctgaggacgacacggatcctggccatgctgacctggtcctctatatcactaggtttgacctggagttgcctgatggtaaccggcaggtgcggggcgtcacccagctgggcggtgcctgctccccaacctggagctgcctcattaccgaggacactggcttcgacctgggagtcaccattgcccatgagattgggcacagcttcggcctggagcacgacggcgcgcccggcagcggctgcggccccagcggacacgtgatggcttcggacggcgccgcgccccgcgccggcctcgcctggtccccctgcagccgccggcagctgctgagcctgctcagcgcaggacgggcgcgctgcgtgtgggacccgccgcggcctcaacccgggtccgcggggcacccgccggatgcgcagcctggcctctactacagcgccaacgagcagtgccgcgtggccttcggccccaaggctgtcgcctgcaccttcgccagggagcacctggatatgtgccaggccctctcctgccacacagacccgctggaccaaagcagctgcagccgcctcctcgttcctctcctggatgggacagaatgtggcgtggagaagtggtgctccaaaggtcgctgccgctccctggtggagctgacccccatagcagcagtgcatgggcgctggtctagctggggtccccgaagtccttgctcccgctcctgcggaggaggtgtggtcaccaggaggcggcagtgcaacaaccccagacctgcctttggggggcgtgcatgtgttggtgctgacctccaggccgagatgtgcaacactcaggcctgcgagaagacccagctggagttcatgtcgcaacagtgcgccaggaccgacggccagccgctgcgctcctcccctggcggcgcctccttctaccactggggtgctgctgtaccacacagccaaggggatgctctgtgcagacacatgtgccgggccattggcgagagcttcatcatgaagcgtggagacagcttcctcgatgggacccggtgtatgccaagtggcccccgggaggacgggaccctgagcctgtgtgtgtcgggcagctgcaggacatttggctgtgatggtaggatggactcccagcaggtatgggacaggtgccaggtgtgtggtggggacaacagcacgtgcagcccacggaagggctctttcacagctggcagagcgagagaatatgtcacgtttctgacagttacccccaacctgaccagtgtctacattgccaaccacaggcctctcttcacacacttggcggtgaggatcggagggcgctatgtcgtggctgggaagatgagcatctcccctaacaccacctacccctccctcctggaggatggtcgtgtcgagtacagagtggccctcaccgaggaccggctgccccgcctggaggagatccgcatctggggacccctccaggaagatgctgacatccaggtttacaggcggtatggcgaggagtatggcaacctcacccgcccagacatcaccttcacctacttccagcctaagccacggcaggcctgggtgtgggccgctgtgcgtgggccctgctcggtgagctgtggggcagggctgcgctgggtaaactacagctgcctggaccaggccaggaaggagttggtggagactgtccagtgccaagggagccagcagccaccagcgtggccagaggcctgcgtgctcgaaccctgccctccctactgggcggtgggagacttcggcccatgcagcgcctcctgtgggggtggcctgcgggagcggccagtgcgctgcgtggaggcccagggcagcctcctgaagacattgcccccagcccggtgcagagcaggggcccagcagccagctgtggcgctggaaacctgcaacccccagccctgccctgccaggtgggaggtgtcagagcccagctcatgcacatcagctggtggagcaggcctggccttggagaacgagacctgtgtgccaggggcagatggcctggaggctccagtgactgaggggcctggctccgtagatgagaagctgcctgcccctgagccctgtgtcgggatgtcatgtcctccaggctggggccatctggatgccacctctgcaggggagaaggctccctccccatggggcagcatcaggacgggggctcaagctgcacacgtgtggacccctgcggcagggtcgtgctccgtctcctgcgggcgaggtctgatggagctccgtttcctgtgcatggactctgccctcagggtgcctgtccaggaagagctgtgtggcctggcaagcaagcctgggagccggcgggaggtctgccaggctgtcccgtgccctgctcggtggcagtacaagctggcggcctgcagcgtgagctgtgggagaggggtcgtgcggaggatcctgtattgtgcccgggcccatggggaggacgatggtgaggagatcctgttggacacccagtgccaggggctgcctcgcccggaaccccaggaggcctgcagcctggagccctgcccacctaggtggaaagtcatgtcccttggcccatgttcggccagctgtggccttggcactgctagacgctcggtggcctgtgtgcagctcgaccaaggccaggacgtggaggtggacgaggcggcctgtgcggcgctggtgcggcccgaggccagtgtcccctgtctcattgccgactgcacctaccgctggcatgttggcacctggatggagtgctctgtttcctgtggggatggcatccagcgccggcgtgacacctgcctcggaccccaggcccaggcgcctgtgccagctgatttctgccagcacttgcccaagccggtgactgtgcgtggctgctgggctgggccctgtgtgggacagggtacgcccagcctggtgccccacgaagaagccgctgctccaggacggaccacagccacccctgctggtgcctccctggagtggtcccaggcccggggcctgctcttctccaaggctccccagcctcggcggctcctgcccgggccccaggaaaactcagtgcagtccagtgcctgtggcaggcagcaccttgagccaacaggaaccattgacatgcgaggcccagggcaggcagactgtgcagtggccattgggcggcccctcggggaggtggtgaccctccgcgtccttgagagttctctcaactgcagtgcgggggacatgttgctgctttggggccggctcacctggaggaagatgtgcaggaagctgttggacatgactttcagctccaagaccaacacgctggtggtgaggcagcgctgcgggcggccaggaggtggggtgctgctgcggtatgggagccagcttgctcctgaaaccttctacagagaatgtgacatgcagctctttgggccctggggtgaaatcgtgagcccctcgctgagtccagccacgagtaatgcagggggctgccggctcttcattaatgtggctccgcacgcacggattgccatccatgccctggccaccaacatgggcgctgggaccgagggagccaatgccagctacatcttgatccgggacacccacagcttgaggaccacagcgttccatgggcagcaggtgctctactgggagtcagagagcagccaggctgagatggagttcagcgagggcttcctgaaggctcaggccagcctgcggggccagtactggaccctccaatcatgggtaccggagatgcaggaccctcagtcctggaagggaaaggaaggaacctctagagggcccttcgaacaaaaactcatctcagaagaggatctgaatatgcataccggtcatcatcaccatcaccat

SEQ ID NO: 127 - DNA, 4359 bp, Artificial Sequence
  Nucleotide sequence corresponding to Human ADAMTS13 protein with a single point mutation P1171I
atgcaccagcgtcacccccgggcaagatgccctcccctctgtgtggccggaatccttgcctgtggctttctcctgggctgctggggaccctcccatttccagcagagctgtcttcaggctttggagccacaggccgtgtcttcttacttgagccctggtgctcccttaaaaggccgccctccttcccctggcttccagaggcagaggcagaggcagaggcgggctgcaggcggcatcctacacctggagctgctggtggccgtgggccccgatgtcttccaggctcaccaggaggacacagagcgctatgtgctcaccaacctcaacatcggggcagaactgcttcgggacccgtccctgggggctcagtttcgggtgcacctggtgaagatggtcattctgacagagcctgagggtgctccaaatatcacagccaacctcacctcgtccctgctgagcgtctgtgggtggagccagaccatcaaccctgaggacgacacggatcctggccatgctgacctggtcctctatatcactaggtttgacctggagttgcctgatggtaaccggcaggtgcggggcgtcacccagctgggcggtgcctgctccccaacctggagctgcctcattaccgaggacactggcttcgacctgggagtcaccattgcccatgagattgggcacagcttcggcctggagcacgacggcgcgcccggcagcggctgcggccccagcggacacgtgatggcttcggacggcgccgcgccccgcgccggcctcgcctggtccccctgcagccgccggcagctgctgagcctgctcagcgcaggacgggcgcgctgcgtgtgggacccgccgcggcctcaacccgggtccgcggggcacccgccggatgcgcagcctggcctctactacagcgccaacgagcagtgccgcgtggccttcggccccaaggctgtcgcctgcaccttcgccagggagcacctggatatgtgccaggccctctcctgccacacagacccgctggaccaaagcagctgcagccgcctcctcgttcctctcctggatgggacagaatgtggcgtggagaagtggtgctccaaaggtcgctgccgctccctggtggagctgacccccatagcagcagtgcatgggcgctggtctagctggggtccccgaagtccttgctcccgctcctgcggaggaggtgtggtcaccaggaggcggcagtgcaacaaccccagacctgcctttggggggcgtgcatgtgttggtgctgacctccaggccgagatgtgcaacactcaggcctgcgagaagacccagctggagttcatgtcgcaacagtgcgccaggaccgacggccagccgctgcgctcctcccctggcggcgcctccttctaccactggggtgctgctgtaccacacagccaaggggatgctctgtgcagacacatgtgccgggccattggcgagagcttcatcatgaagcgtggagacagcttcctcgatgggacccggtgtatgccaagtggcccccgggaggacgggaccctgagcctgtgtgtgtcgggcagctgcaggacatttggctgtgatggtaggatggactcccagcaggtatgggacaggtgccaggtgtgtggtggggacaacagcacgtgcagcccacggaagggctctttcacagctggcagagcgagagaatatgtcacgtttctgacagttacccccaacctgaccagtgtctacattgccaaccacaggcctctcttcacacacttggcggtgaggatcggagggcgctatgtcgtggctgggaagatgagcatctcccctaacaccacctacccctccctcctggaggatggtcgtgtcgagtacagagtggccctcaccgaggaccggctgccccgcctggaggagatccgcatctggggacccctccaggaagatgctgacatccaggtttacaggcggtatggcgaggagtatggcaacctcacccgcccagacatcaccttcacctacttccagcctaagccacggcaggcctgggtgtgggccgctgtgcgtgggccctgctcggtgagctgtggggcagggctgcgctgggtaaactacagctgcctggaccaggccaggaaggagttggtggagactgtccagtgccaagggagccagcagccaccagcgtggccagaggcctgcgtgctcgaaccctgccctccctactgggcggtgggagacttcggcccatgcagcgcctcctgtgggggtggcctgcgggagcggccagtgcgctgcgtggaggcccagggcagcctcctgaagacattgcccccagcccggtgcagagcaggggcccagcagccagctgtggcgctggaaacctgcaacccccagccctgccctgccaggtgggaggtgtcagagcccagctcatgcacatcagctggtggagcaggcctggccttggagaacgagacctgtgtgccaggggcagatggcctggaggctccagtgactgaggggcctggctccgtagatgagaagctgcctgcccctgagccctgtgtcgggatgtcatgtcctccaggctggggccatctggatgccacctctgcaggggagaaggctccctccccatggggcagcatcaggacgggggctcaagctgcacacgtgtggacccctgcggcagggtcgtgctccgtctcctgcgggcgaggtctgatggagctccgtttcctgtgcatggactctgccctcagggtgcctgtccaggaagagctgtgtggcctggcaagcaagcctgggagccggcgggaggtctgccaggctgtcccgtgccctgctcggtggcagtacaagctggcggcctgcagcgtgagctgtgggagaggggtcgtgcggaggatcctgtattgtgcccgggcccatggggaggacgatggtgaggagatcctgttggacacccagtgccaggggctgcctcgcccggaaccccaggaggcctgcagcctggagccctgcccacctaggtggaaagtcatgtcccttggcccatgttcggccagctgtggccttggcactgctagacgctcggtggcctgtgtgcagctcgaccaaggccaggacgtggaggtggacgaggcggcctgtgcggcgctggtgcggcccgaggccagtgtcccctgtctcattgccgactgcacctaccgctggcatgttggcacctggatggagtgctctgtttcctgtggggatggcatccagcgccggcgtgacacctgcctcggaccccaggcccaggcgcctgtgccagctgatttctgccagcacttgcccaagccggtgactgtgcgtggctgctgggctgggccctgtgtgggacagggtacgcccagcctggtgccccacgaagaagccgctgctccaggacggaccacagccacccctgctggtgcctccctggagtggtcccaggcccggggcctgctcttctccattgctccccagcctcggcggctcctgcccgggccccaggaaaactcagtgcagtccagtgcctgtggcaggcagcaccttgagccaacaggaaccattgacatgcgaggcccagggcaggcagactgtgcagtggccattgggcggcccctcggggaggtggtgaccctccgcgtccttgagagttctctcaactgcagtgcgggggacatgttgctgctttggggccggctcacctggaggaagatgtgcaggaagctgttggacatgactttcagctccaagaccaacacgctggtggtgaggcagcgctgcgggcggccaggaggtggggtgctgctgcggtatgggagccagcttgctcctgaaaccttctacagagaatgtgacatgcagctctttgggccctggggtgaaatcgtgagcccctcgctgagtccagccacgagtaatgcagggggctgccggctcttcattaatgtggctccgcacgcacggattgccatccatgccctggccaccaacatgggcgctgggaccgagggagccaatgccagctacatcttgatccgggacacccacagcttgaggaccacagcgttccatgggcagcaggtgctctactgggagtcagagagcagccaggctgagatggagttcagcgagggcttcctgaaggctcaggccagcctgcggggccagtactggaccctccaatcatgggtaccggagatgcaggaccctcagtcctggaagggaaaggaaggaacctctagagggcccttcgaacaaaaactcatctcagaagaggatctgaatatgcataccggtcatcatcaccatcaccat

SEQ ID NO: 128 - DNA, 4359 bp, Artificial Sequence
  Nucleotide sequence corresponding to Human ADAMTS13 protein with a single point mutation P1173K
atgcaccagcgtcacccccgggcaagatgccctcccctctgtgtggccggaatccttgcctgtggctttctcctgggctgctggggaccctcccatttccagcagagctgtcttcaggctttggagccacaggccgtgtcttcttacttgagccctggtgctcccttaaaaggccgccctccttcccctggcttccagaggcagaggcagaggcagaggcgggctgcaggcggcatcctacacctggagctgctggtggccgtgggccccgatgtcttccaggctcaccaggaggacacagagcgctatgtgctcaccaacctcaacatcggggcagaactgcttcgggacccgtccctgggggctcagtttcgggtgcacctggtgaagatggtcattctgacagagcctgagggtgctccaaatatcacagccaacctcacctcgtccctgctgagcgtctgtgggtggagccagaccatcaaccctgaggacgacacggatcctggccatgctgacctggtcctctatatcactaggtttgacctggagttgcctgatggtaaccggcaggtgcggggcgtcacccagctgggcggtgcctgctccccaacctggagctgcctcattaccgaggacactggcttcgacctgggagtcaccattgcccatgagattgggcacagcttcggcctggagcacgacggcgcgcccggcagcggctgcggccccagcggacacgtgatggcttcggacggcgccgcgccccgcgccggcctcgcctggtccccctgcagccgccggcagctgctgagcctgctcagcgcaggacgggcgcgctgcgtgtgggacccgccgcggcctcaacccgggtccgcggggcacccgccggatgcgcagcctggcctctactacagcgccaacgagcagtgccgcgtggccttcggccccaaggctgtcgcctgcaccttcgccagggagcacctggatatgtgccaggccctctcctgccacacagacccgctggaccaaagcagctgcagccgcctcctcgttcctctcctggatgggacagaatgtggcgtggagaagtggtgctccaaaggtcgctgccgctccctggtggagctgacccccatagcagcagtgcatgggcgctggtctagctggggtccccgaagtccttgctcccgctcctgcggaggaggtgtggtcaccaggaggcggcagtgcaacaaccccagacctgcctttggggggcgtgcatgtgttggtgctgacctccaggccgagatgtgcaacactcaggcctgcgagaagacccagctggagttcatgtcgcaacagtgcgccaggaccgacggccagccgctgcgctcctcccctggcggcgcctccttctaccactggggtgctgctgtaccacacagccaaggggatgctctgtgcagacacatgtgccgggccattggcgagagcttcatcatgaagcgtggagacagcttcctcgatgggacccggtgtatgccaagtggcccccgggaggacgggaccctgagcctgtgtgtgtcgggcagctgcaggacatttggctgtgatggtaggatggactcccagcaggtatgggacaggtgccaggtgtgtggtggggacaacagcacgtgcagcccacggaagggctctttcacagctggcagagcgagagaatatgtcacgtttctgacagttacccccaacctgaccagtgtctacattgccaaccacaggcctctcttcacacacttggcggtgaggatcggagggcgctatgtcgtggctgggaagatgagcatctcccctaacaccacctacccctccctcctggaggatggtcgtgtcgagtacagagtggccctcaccgaggaccggctgccccgcctggaggagatccgcatctggggacccctccaggaagatgctgacatccaggtttacaggcggtatggcgaggagtatggcaacctcacccgcccagacatcaccttcacctacttccagcctaagccacggcaggcctgggtgtgggccgctgtgcgtgggccctgctcggtgagctgtggggcagggctgcgctgggtaaactacagctgcctggaccaggccaggaaggagttggtggagactgtccagtgccaagggagccagcagccaccagcgtggccagaggcctgcgtgctcgaaccctgccctccctactgggcggtgggagacttcggcccatgcagcgcctcctgtgggggtggcctgcgggagcggccagtgcgctgcgtggaggcccagggcagcctcctgaagacattgcccccagcccggtgcagagcaggggcccagcagccagctgtggcgctggaaacctgcaacccccagccctgccctgccaggtgggaggtgtcagagcccagctcatgcacatcagctggtggagcaggcctggccttggagaacgagacctgtgtgccaggggcagatggcctggaggctccagtgactgaggggcctggctccgtagatgagaagctgcctgcccctgagccctgtgtcgggatgtcatgtcctccaggctggggccatctggatgccacctctgcaggggagaaggctccctccccatggggcagcatcaggacgggggctcaagctgcacacgtgtggacccctgcggcagggtcgtgctccgtctcctgcgggcgaggtctgatggagctccgtttcctgtgcatggactctgccctcagggtgcctgtccaggaagagctgtgtggcctggcaagcaagcctgggagccggcgggaggtctgccaggctgtcccgtgccctgctcggtggcagtacaagctggcggcctgcagcgtgagctgtgggagaggggtcgtgcggaggatcctgtattgtgcccgggcccatggggaggacgatggtgaggagatcctgttggacacccagtgccaggggctgcctcgcccggaaccccaggaggcctgcagcctggagccctgcccacctaggtggaaagtcatgtcccttggcccatgttcggccagctgtggccttggcactgctagacgctcggtggcctgtgtgcagctcgaccaaggccaggacgtggaggtggacgaggcggcctgtgcggcgctggtgcggcccgaggccagtgtcccctgtctcattgccgactgcacctaccgctggcatgttggcacctggatggagtgctctgtttcctgtggggatggcatccagcgccggcgtgacacctgcctcggaccccaggcccaggcgcctgtgccagctgatttctgccagcacttgcccaagccggtgactgtgcgtggctgctgggctgggccctgtgtgggacagggtacgcccagcctggtgccccacgaagaagccgctgctccaggacggaccacagccacccctgctggtgcctccctggagtggtcccaggcccggggcctgctcttctccccggctaagcagcctcggcggctcctgcccgggccccaggaaaactcagtgcagtccagtgcctgtggcaggcagcaccttgagccaacaggaaccattgacatgcgaggcccagggcaggcagactgtgcagtggccattgggcggcccctcggggaggtggtgaccctccgcgtccttgagagttctctcaactgcagtgcgggggacatgttgctgctttggggccggctcacctggaggaagatgtgcaggaagctgttggacatgactttcagctccaagaccaacacgctggtggtgaggcagcgctgcgggcggccaggaggtggggtgctgctgcggtatgggagccagcttgctcctgaaaccttctacagagaatgtgacatgcagctctttgggccctggggtgaaatcgtgagcccctcgctgagtccagccacgagtaatgcagggggctgccggctcttcattaatgtggctccgcacgcacggattgccatccatgccctggccaccaacatgggcgctgggaccgagggagccaatgccagctacatcttgatccgggacacccacagcttgaggaccacagcgttccatgggcagcaggtgctctactgggagtcagagagcagccaggctgagatggagttcagcgagggcttcctgaaggctcaggccagcctgcggggccagtactggaccctccaatcatgggtaccggagatgcaggaccctcagtcctggaagggaaaggaaggaacctctagagggcccttcgaacaaaaactcatctcagaagaggatctgaatatgcataccggtcatcatcaccatcaccat

SEQ ID NO: 129 - DNA, 4359 bp, Artificial Sequence
  Nucleotide sequence corresponding to Human ADAMTS13 protein with a single point mutation P1173I
atgcaccagcgtcacccccgggcaagatgccctcccctctgtgtggccggaatccttgcctgtggctttctcctgggctgctggggaccctcccatttccagcagagctgtcttcaggctttggagccacaggccgtgtcttcttacttgagccctggtgctcccttaaaaggccgccctccttcccctggcttccagaggcagaggcagaggcagaggcgggctgcaggcggcatcctacacctggagctgctggtggccgtgggccccgatgtcttccaggctcaccaggaggacacagagcgctatgtgctcaccaacctcaacatcggggcagaactgcttcgggacccgtccctgggggctcagtttcgggtgcacctggtgaagatggtcattctgacagagcctgagggtgctccaaatatcacagccaacctcacctcgtccctgctgagcgtctgtgggtggagccagaccatcaaccctgaggacgacacggatcctggccatgctgacctggtcctctatatcactaggtttgacctggagttgcctgatggtaaccggcaggtgcggggcgtcacccagctgggcggtgcctgctccccaacctggagctgcctcattaccgaggacactggcttcgacctgggagtcaccattgcccatgagattgggcacagcttcggcctggagcacgacggcgcgcccggcagcggctgcggccccagcggacacgtgatggcttcggacggcgccgcgccccgcgccggcctcgcctggtccccctgcagccgccggcagctgctgagcctgctcagcgcaggacgggcgcgctgcgtgtgggacccgccgcggcctcaacccgggtccgcggggcacccgccggatgcgcagcctggcctctactacagcgccaacgagcagtgccgcgtggccttcggccccaaggctgtcgcctgcaccttcgccagggagcacctggatatgtgccaggccctctcctgccacacagacccgctggaccaaagcagctgcagccgcctcctcgttcctctcctggatgggacagaatgtggcgtggagaagtggtgctccaaaggtcgctgccgctccctggtggagctgacccccatagcagcagtgcatgggcgctggtctagctggggtccccgaagtccttgctcccgctcctgcggaggaggtgtggtcaccaggaggcggcagtgcaacaaccccagacctgcctttggggggcgtgcatgtgttggtgctgacctccaggccgagatgtgcaacactcaggcctgcgagaagacccagctggagttcatgtcgcaacagtgcgccaggaccgacggccagccgctgcgctcctcccctggcggcgcctccttctaccactggggtgctgctgtaccacacagccaaggggatgctctgtgcagacacatgtgccgggccattggcgagagcttcatcatgaagcgtggagacagcttcctcgatgggacccggtgtatgccaagtggcccccgggaggacgggaccctgagcctgtgtgtgtcgggcagctgcaggacatttggctgtgatggtaggatggactcccagcaggtatgggacaggtgccaggtgtgtggtggggacaacagcacgtgcagcccacggaagggctctttcacagctggcagagcgagagaatatgtcacgtttctgacagttacccccaacctgaccagtgtctacattgccaaccacaggcctctcttcacacacttggcggtgaggatcggagggcgctatgtcgtggctgggaagatgagcatctcccctaacaccacctacccctccctcctggaggatggtcgtgtcgagtacagagtggccctcaccgaggaccggctgccccgcctggaggagatccgcatctggggacccctccaggaagatgctgacatccaggtttacaggcggtatggcgaggagtatggcaacctcacccgcccagacatcaccttcacctacttccagcctaagccacggcaggcctgggtgtgggccgctgtgcgtgggccctgctcggtgagctgtggggcagggctgcgctgggtaaactacagctgcctggaccaggccaggaaggagttggtggagactgtccagtgccaagggagccagcagccaccagcgtggccagaggcctgcgtgctcgaaccctgccctccctactgggcggtgggagacttcggcccatgcagcgcctcctgtgggggtggcctgcgggagcggccagtgcgctgcgtggaggcccagggcagcctcctgaagacattgcccccagcccggtgcagagcaggggcccagcagccagctgtggcgctggaaacctgcaacccccagccctgccctgccaggtgggaggtgtcagagcccagctcatgcacatcagctggtggagcaggcctggccttggagaacgagacctgtgtgccaggggcagatggcctggaggctccagtgactgaggggcctggctccgtagatgagaagctgcctgcccctgagccctgtgtcgggatgtcatgtcctccaggctggggccatctggatgccacctctgcaggggagaaggctccctccccatggggcagcatcaggacgggggctcaagctgcacacgtgtggacccctgcggcagggtcgtgctccgtctcctgcgggcgaggtctgatggagctccgtttcctgtgcatggactctgccctcagggtgcctgtccaggaagagctgtgtggcctggcaagcaagcctgggagccggcgggaggtctgccaggctgtcccgtgccctgctcggtggcagtacaagctggcggcctgcagcgtgagctgtgggagaggggtcgtgcggaggatcctgtattgtgcccgggcccatggggaggacgatggtgaggagatcctgttggacacccagtgccaggggctgcctcgcccggaaccccaggaggcctgcagcctggagccctgcccacctaggtggaaagtcatgtcccttggcccatgttcggccagctgtggccttggcactgctagacgctcggtggcctgtgtgcagctcgaccaaggccaggacgtggaggtggacgaggcggcctgtgcggcgctggtgcggcccgaggccagtgtcccctgtctcattgccgactgcacctaccgctggcatgttggcacctggatggagtgctctgtttcctgtggggatggcatccagcgccggcgtgacacctgcctcggaccccaggcccaggcgcctgtgccagctgatttctgccagcacttgcccaagccggtgactgtgcgtggctgctgggctgggccctgtgtgggacagggtacgcccagcctggtgccccacgaagaagccgctgctccaggacggaccacagccacccctgctggtgcctccctggagtggtcccaggcccggggcctgctcttctccccggctattcagcctcggcggctcctgcccgggccccaggaaaactcagtgcagtccagtgcctgtggcaggcagcaccttgagccaacaggaaccattgacatgcgaggcccagggcaggcagactgtgcagtggccattgggcggcccctcggggaggtggtgaccctccgcgtccttgagagttctctcaactgcagtgcgggggacatgttgctgctttggggccggctcacctggaggaagatgtgcaggaagctgttggacatgactttcagctccaagaccaacacgctggtggtgaggcagcgctgcgggcggccaggaggtggggtgctgctgcggtatgggagccagcttgctcctgaaaccttctacagagaatgtgacatgcagctctttgggccctggggtgaaatcgtgagcccctcgctgagtccagccacgagtaatgcagggggctgccggctcttcattaatgtggctccgcacgcacggattgccatccatgccctggccaccaacatgggcgctgggaccgagggagccaatgccagctacatcttgatccgggacacccacagcttgaggaccacagcgttccatgggcagcaggtgctctactgggagtcagagagcagccaggctgagatggagttcagcgagggcttcctgaaggctcaggccagcctgcggggccagtactggaccctccaatcatgggtaccggagatgcaggaccctcagtcctggaagggaaaggaaggaacctctagagggcccttcgaacaaaaactcatctcagaagaggatctgaatatgcataccggtcatcatcaccatcaccat

SEQ ID NO: 130 - DNA, 4359 bp, Artificial Sequence
  Nucleotide sequence corresponding to Human ADAMTS13 protein with a single point mutation P1175K
atgcaccagcgtcacccccgggcaagatgccctcccctctgtgtggccggaatccttgcctgtggctttctcctgggctgctggggaccctcccatttccagcagagctgtcttcaggctttggagccacaggccgtgtcttcttacttgagccctggtgctcccttaaaaggccgccctccttcccctggcttccagaggcagaggcagaggcagaggcgggctgcaggcggcatcctacacctggagctgctggtggccgtgggccccgatgtcttccaggctcaccaggaggacacagagcgctatgtgctcaccaacctcaacatcggggcagaactgcttcgggacccgtccctgggggctcagtttcgggtgcacctggtgaagatggtcattctgacagagcctgagggtgctccaaatatcacagccaacctcacctcgtccctgctgagcgtctgtgggtggagccagaccatcaaccctgaggacgacacggatcctggccatgctgacctggtcctctatatcactaggtttgacctggagttgcctgatggtaaccggcaggtgcggggcgtcacccagctgggcggtgcctgctccccaacctggagctgcctcattaccgaggacactggcttcgacctgggagtcaccattgcccatgagattgggcacagcttcggcctggagcacgacggcgcgcccggcagcggctgcggccccagcggacacgtgatggcttcggacggcgccgcgccccgcgccggcctcgcctggtccccctgcagccgccggcagctgctgagcctgctcagcgcaggacgggcgcgctgcgtgtgggacccgccgcggcctcaacccgggtccgcggggcacccgccggatgcgcagcctggcctctactacagcgccaacgagcagtgccgcgtggccttcggccccaaggctgtcgcctgcaccttcgccagggagcacctggatatgtgccaggccctctcctgccacacagacccgctggaccaaagcagctgcagccgcctcctcgttcctctcctggatgggacagaatgtggcgtggagaagtggtgctccaaaggtcgctgccgctccctggtggagctgacccccatagcagcagtgcatgggcgctggtctagctggggtccccgaagtccttgctcccgctcctgcggaggaggtgtggtcaccaggaggcggcagtgcaacaaccccagacctgcctttggggggcgtgcatgtgttggtgctgacctccaggccgagatgtgcaacactcaggcctgcgagaagacccagctggagttcatgtcgcaacagtgcgccaggaccgacggccagccgctgcgctcctcccctggcggcgcctccttctaccactggggtgctgctgtaccacacagccaaggggatgctctgtgcagacacatgtgccgggccattggcgagagcttcatcatgaagcgtggagacagcttcctcgatgggacccggtgtatgccaagtggcccccgggaggacgggaccctgagcctgtgtgtgtcgggcagctgcaggacatttggctgtgatggtaggatggactcccagcaggtatgggacaggtgccaggtgtgtggtggggacaacagcacgtgcagcccacggaagggctctttcacagctggcagagcgagagaatatgtcacgtttctgacagttacccccaacctgaccagtgtctacattgccaaccacaggcctctcttcacacacttggcggtgaggatcggagggcgctatgtcgtggctgggaagatgagcatctcccctaacaccacctacccctccctcctggaggatggtcgtgtcgagtacagagtggccctcaccgaggaccggctgccccgcctggaggagatccgcatctggggacccctccaggaagatgctgacatccaggtttacaggcggtatggcgaggagtatggcaacctcacccgcccagacatcaccttcacctacttccagcctaagccacggcaggcctgggtgtgggccgctgtgcgtgggccctgctcggtgagctgtggggcagggctgcgctgggtaaactacagctgcctggaccaggccaggaaggagttggtggagactgtccagtgccaagggagccagcagccaccagcgtggccagaggcctgcgtgctcgaaccctgccctccctactgggcggtgggagacttcggcccatgcagcgcctcctgtgggggtggcctgcgggagcggccagtgcgctgcgtggaggcccagggcagcctcctgaagacattgcccccagcccggtgcagagcaggggcccagcagccagctgtggcgctggaaacctgcaacccccagccctgccctgccaggtgggaggtgtcagagcccagctcatgcacatcagctggtggagcaggcctggccttggagaacgagacctgtgtgccaggggcagatggcctggaggctccagtgactgaggggcctggctccgtagatgagaagctgcctgcccctgagccctgtgtcgggatgtcatgtcctccaggctggggccatctggatgccacctctgcaggggagaaggctccctccccatggggcagcatcaggacgggggctcaagctgcacacgtgtggacccctgcggcagggtcgtgctccgtctcctgcgggcgaggtctgatggagctccgtttcctgtgcatggactctgccctcagggtgcctgtccaggaagagctgtgtggcctggcaagcaagcctgggagccggcgggaggtctgccaggctgtcccgtgccctgctcggtggcagtacaagctggcggcctgcagcgtgagctgtgggagaggggtcgtgcggaggatcctgtattgtgcccgggcccatggggaggacgatggtgaggagatcctgttggacacccagtgccaggggctgcctcgcccggaaccccaggaggcctgcagcctggagccctgcccacctaggtggaaagtcatgtcccttggcccatgttcggccagctgtggccttggcactgctagacgctcggtggcctgtgtgcagctcgaccaaggccaggacgtggaggtggacgaggcggcctgtgcggcgctggtgcggcccgaggccagtgtcccctgtctcattgccgactgcacctaccgctggcatgttggcacctggatggagtgctctgtttcctgtggggatggcatccagcgccggcgtgacacctgcctcggaccccaggcccaggcgcctgtgccagctgatttctgccagcacttgcccaagccggtgactgtgcgtggctgctgggctgggccctgtgtgggacagggtacgcccagcctggtgccccacgaagaagccgctgctccaggacggaccacagccacccctgctggtgcctccctggagtggtcccaggcccggggcctgctcttctccccggctccccagaagcggcggctcctgcccgggccccaggaaaactcagtgcagtccagtgcctgtggcaggcagcaccttgagccaacaggaaccattgacatgcgaggcccagggcaggcagactgtgcagtggccattgggcggcccctcggggaggtggtgaccctccgcgtccttgagagttctctcaactgcagtgcgggggacatgttgctgctttggggccggctcacctggaggaagatgtgcaggaagctgttggacatgactttcagctccaagaccaacacgctggtggtgaggcagcgctgcgggcggccaggaggtggggtgctgctgcggtatgggagccagcttgctcctgaaaccttctacagagaatgtgacatgcagctctttgggccctggggtgaaatcgtgagcccctcgctgagtccagccacgagtaatgcagggggctgccggctcttcattaatgtggctccgcacgcacggattgccatccatgccctggccaccaacatgggcgctgggaccgagggagccaatgccagctacatcttgatccgggacacccacagcttgaggaccacagcgttccatgggcagcaggtgctctactgggagtcagagagcagccaggctgagatggagttcagcgagggcttcctgaaggctcaggccagcctgcggggccagtactggaccctccaatcatgggtaccggagatgcaggaccctcagtcctggaagggaaaggaaggaacctctagagggcccttcgaacaaaaactcatctcagaagaggatctgaatatgcataccggtcatcatcaccatcaccat

SEQ ID NO: 131 - DNA, 4359 bp, Artificial Sequence
  Nucleotide sequence corresponding to Human ADAMTS13 protein with a single point mutation P1175I
atgcaccagcgtcacccccgggcaagatgccctcccctctgtgtggccggaatccttgcctgtggctttctcctgggctgctggggaccctcccatttccagcagagctgtcttcaggctttggagccacaggccgtgtcttcttacttgagccctggtgctcccttaaaaggccgccctccttcccctggcttccagaggcagaggcagaggcagaggcgggctgcaggcggcatcctacacctggagctgctggtggccgtgggccccgatgtcttccaggctcaccaggaggacacagagcgctatgtgctcaccaacctcaacatcggggcagaactgcttcgggacccgtccctgggggctcagtttcgggtgcacctggtgaagatggtcattctgacagagcctgagggtgctccaaatatcacagccaacctcacctcgtccctgctgagcgtctgtgggtggagccagaccatcaaccctgaggacgacacggatcctggccatgctgacctggtcctctatatcactaggtttgacctggagttgcctgatggtaaccggcaggtgcggggcgtcacccagctgggcggtgcctgctccccaacctggagctgcctcattaccgaggacactggcttcgacctgggagtcaccattgcccatgagattgggcacagcttcggcctggagcacgacggcgcgcccggcagcggctgcggccccagcggacacgtgatggcttcggacggcgccgcgccccgcgccggcctcgcctggtccccctgcagccgccggcagctgctgagcctgctcagcgcaggacgggcgcgctgcgtgtgggacccgccgcggcctcaacccgggtccgcggggcacccgccggatgcgcagcctggcctctactacagcgccaacgagcagtgccgcgtggccttcggccccaaggctgtcgcctgcaccttcgccagggagcacctggatatgtgccaggccctctcctgccacacagacccgctggaccaaagcagctgcagccgcctcctcgttcctctcctggatgggacagaatgtggcgtggagaagtggtgctccaaaggtcgctgccgctccctggtggagctgacccccatagcagcagtgcatgggcgctggtctagctggggtccccgaagtccttgctcccgctcctgcggaggaggtgtggtcaccaggaggcggcagtgcaacaaccccagacctgcctttggggggcgtgcatgtgttggtgctgacctccaggccgagatgtgcaacactcaggcctgcgagaagacccagctggagttcatgtcgcaacagtgcgccaggaccgacggccagccgctgcgctcctcccctggcggcgcctccttctaccactggggtgctgctgtaccacacagccaaggggatgctctgtgcagacacatgtgccgggccattggcgagagcttcatcatgaagcgtggagacagcttcctcgatgggacccggtgtatgccaagtggcccccgggaggacgggaccctgagcctgtgtgtgtcgggcagctgcaggacatttggctgtgatggtaggatggactcccagcaggtatgggacaggtgccaggtgtgtggtggggacaacagcacgtgcagcccacggaagggctctttcacagctggcagagcgagagaatatgtcacgtttctgacagttacccccaacctgaccagtgtctacattgccaaccacaggcctctcttcacacacttggcggtgaggatcggagggcgctatgtcgtggctgggaagatgagcatctcccctaacaccacctacccctccctcctggaggatggtcgtgtcgagtacagagtggccctcaccgaggaccggctgccccgcctggaggagatccgcatctggggacccctccaggaagatgctgacatccaggtttacaggcggtatggcgaggagtatggcaacctcacccgcccagacatcaccttcacctacttccagcctaagccacggcaggcctgggtgtgggccgctgtgcgtgggccctgctcggtgagctgtggggcagggctgcgctgggtaaactacagctgcctggaccaggccaggaaggagttggtggagactgtccagtgccaagggagccagcagccaccagcgtggccagaggcctgcgtgctcgaaccctgccctccctactgggcggtgggagacttcggcccatgcagcgcctcctgtgggggtggcctgcgggagcggccagtgcgctgcgtggaggcccagggcagcctcctgaagacattgcccccagcccggtgcagagcaggggcccagcagccagctgtggcgctggaaacctgcaacccccagccctgccctgccaggtgggaggtgtcagagcccagctcatgcacatcagctggtggagcaggcctggccttggagaacgagacctgtgtgccaggggcagatggcctggaggctccagtgactgaggggcctggctccgtagatgagaagctgcctgcccctgagccctgtgtcgggatgtcatgtcctccaggctggggccatctggatgccacctctgcaggggagaaggctccctccccatggggcagcatcaggacgggggctcaagctgcacacgtgtggacccctgcggcagggtcgtgctccgtctcctgcgggcgaggtctgatggagctccgtttcctgtgcatggactctgccctcagggtgcctgtccaggaagagctgtgtggcctggcaagcaagcctgggagccggcgggaggtctgccaggctgtcccgtgccctgctcggtggcagtacaagctggcggcctgcagcgtgagctgtgggagaggggtcgtgcggaggatcctgtattgtgcccgggcccatggggaggacgatggtgaggagatcctgttggacacccagtgccaggggctgcctcgcccggaaccccaggaggcctgcagcctggagccctgcccacctaggtggaaagtcatgtcccttggcccatgttcggccagctgtggccttggcactgctagacgctcggtggcctgtgtgcagctcgaccaaggccaggacgtggaggtggacgaggcggcctgtgcggcgctggtgcggcccgaggccagtgtcccctgtctcattgccgactgcacctaccgctggcatgttggcacctggatggagtgctctgtttcctgtggggatggcatccagcgccggcgtgacacctgcctcggaccccaggcccaggcgcctgtgccagctgatttctgccagcacttgcccaagccggtgactgtgcgtggctgctgggctgggccctgtgtgggacagggtacgcccagcctggtgccccacgaagaagccgctgctccaggacggaccacagccacccctgctggtgcctccctggagtggtcccaggcccggggcctgctcttctccccggctccccagattcggcggctcctgcccgggccccaggaaaactcagtgcagtccagtgcctgtggcaggcagcaccttgagccaacaggaaccattgacatgcgaggcccagggcaggcagactgtgcagtggccattgggcggcccctcggggaggtggtgaccctccgcgtccttgagagttctctcaactgcagtgcgggggacatgttgctgctttggggccggctcacctggaggaagatgtgcaggaagctgttggacatgactttcagctccaagaccaacacgctggtggtgaggcagcgctgcgggcggccaggaggtggggtgctgctgcggtatgggagccagcttgctcctgaaaccttctacagagaatgtgacatgcagctctttgggccctggggtgaaatcgtgagcccctcgctgagtccagccacgagtaatgcagggggctgccggctcttcattaatgtggctccgcacgcacggattgccatccatgccctggccaccaacatgggcgctgggaccgagggagccaatgccagctacatcttgatccgggacacccacagcttgaggaccacagcgttccatgggcagcaggtgctctactgggagtcagagagcagccaggctgagatggagttcagcgagggcttcctgaaggctcaggccagcctgcggggccagtactggaccctccaatcatgggtaccggagatgcaggaccctcagtcctggaagggaaaggaaggaacctctagagggcccttcgaacaaaaactcatctcagaagaggatctgaatatgcataccggtcatcatcaccatcaccat

SEQ ID NO: 132 - DNA, 4359 bp, Artificial Sequence
  Nucleotide sequence corresponding to Human ADAMTS13 protein with a single point mutation P1180K
atgcaccagcgtcacccccgggcaagatgccctcccctctgtgtggccggaatccttgcctgtggctttctcctgggctgctggggaccctcccatttccagcagagctgtcttcaggctttggagccacaggccgtgtcttcttacttgagccctggtgctcccttaaaaggccgccctccttcccctggcttccagaggcagaggcagaggcagaggcgggctgcaggcggcatcctacacctggagctgctggtggccgtgggccccgatgtcttccaggctcaccaggaggacacagagcgctatgtgctcaccaacctcaacatcggggcagaactgcttcgggacccgtccctgggggctcagtttcgggtgcacctggtgaagatggtcattctgacagagcctgagggtgctccaaatatcacagccaacctcacctcgtccctgctgagcgtctgtgggtggagccagaccatcaaccctgaggacgacacggatcctggccatgctgacctggtcctctatatcactaggtttgacctggagttgcctgatggtaaccggcaggtgcggggcgtcacccagctgggcggtgcctgctccccaacctggagctgcctcattaccgaggacactggcttcgacctgggagtcaccattgcccatgagattgggcacagcttcggcctggagcacgacggcgcgcccggcagcggctgcggccccagcggacacgtgatggcttcggacggcgccgcgccccgcgccggcctcgcctggtccccctgcagccgccggcagctgctgagcctgctcagcgcaggacgggcgcgctgcgtgtgggacccgccgcggcctcaacccgggtccgcggggcacccgccggatgcgcagcctggcctctactacagcgccaacgagcagtgccgcgtggccttcggccccaaggctgtcgcctgcaccttcgccagggagcacctggatatgtgccaggccctctcctgccacacagacccgctggaccaaagcagctgcagccgcctcctcgttcctctcctggatgggacagaatgtggcgtggagaagtggtgctccaaaggtcgctgccgctccctggtggagctgacccccatagcagcagtgcatgggcgctggtctagctggggtccccgaagtccttgctcccgctcctgcggaggaggtgtggtcaccaggaggcggcagtgcaacaaccccagacctgcctttggggggcgtgcatgtgttggtgctgacctccaggccgagatgtgcaacactcaggcctgcgagaagacccagctggagttcatgtcgcaacagtgcgccaggaccgacggccagccgctgcgctcctcccctggcggcgcctccttctaccactggggtgctgctgtaccacacagccaaggggatgctctgtgcagacacatgtgccgggccattggcgagagcttcatcatgaagcgtggagacagcttcctcgatgggacccggtgtatgccaagtggcccccgggaggacgggaccctgagcctgtgtgtgtcgggcagctgcaggacatttggctgtgatggtaggatggactcccagcaggtatgggacaggtgccaggtgtgtggtggggacaacagcacgtgcagcccacggaagggctctttcacagctggcagagcgagagaatatgtcacgtttctgacagttacccccaacctgaccagtgtctacattgccaaccacaggcctctcttcacacacttggcggtgaggatcggagggcgctatgtcgtggctgggaagatgagcatctcccctaacaccacctacccctccctcctggaggatggtcgtgtcgagtacagagtggccctcaccgaggaccggctgccccgcctggaggagatccgcatctggggacccctccaggaagatgctgacatccaggtttacaggcggtatggcgaggagtatggcaacctcacccgcccagacatcaccttcacctacttccagcctaagccacggcaggcctgggtgtgggccgctgtgcgtgggccctgctcggtgagctgtggggcagggctgcgctgggtaaactacagctgcctggaccaggccaggaaggagttggtggagactgtccagtgccaagggagccagcagccaccagcgtggccagaggcctgcgtgctcgaaccctgccctccctactgggcggtgggagacttcggcccatgcagcgcctcctgtgggggtggcctgcgggagcggccagtgcgctgcgtggaggcccagggcagcctcctgaagacattgcccccagcccggtgcagagcaggggcccagcagccagctgtggcgctggaaacctgcaacccccagccctgccctgccaggtgggaggtgtcagagcccagctcatgcacatcagctggtggagcaggcctggccttggagaacgagacctgtgtgccaggggcagatggcctggaggctccagtgactgaggggcctggctccgtagatgagaagctgcctgcccctgagccctgtgtcgggatgtcatgtcctccaggctggggccatctggatgccacctctgcaggggagaaggctccctccccatggggcagcatcaggacgggggctcaagctgcacacgtgtggacccctgcggcagggtcgtgctccgtctcctgcgggcgaggtctgatggagctccgtttcctgtgcatggactctgccctcagggtgcctgtccaggaagagctgtgtggcctggcaagcaagcctgggagccggcgggaggtctgccaggctgtcccgtgccctgctcggtggcagtacaagctggcggcctgcagcgtgagctgtgggagaggggtcgtgcggaggatcctgtattgtgcccgggcccatggggaggacgatggtgaggagatcctgttggacacccagtgccaggggctgcctcgcccggaaccccaggaggcctgcagcctggagccctgcccacctaggtggaaagtcatgtcccttggcccatgttcggccagctgtggccttggcactgctagacgctcggtggcctgtgtgcagctcgaccaaggccaggacgtggaggtggacgaggcggcctgtgcggcgctggtgcggcccgaggccagtgtcccctgtctcattgccgactgcacctaccgctggcatgttggcacctggatggagtgctctgtttcctgtggggatggcatccagcgccggcgtgacacctgcctcggaccccaggcccaggcgcctgtgccagctgatttctgccagcacttgcccaagccggtgactgtgcgtggctgctgggctgggccctgtgtgggacagggtacgcccagcctggtgccccacgaagaagccgctgctccaggacggaccacagccacccctgctggtgcctccctggagtggtcccaggcccggggcctgctcttctccccggctccccagcctcggcggctcctgaaggggccccaggaaaactcagtgcagtccagtgcctgtggcaggcagcaccttgagccaacaggaaccattgacatgcgaggcccagggcaggcagactgtgcagtggccattgggcggcccctcggggaggtggtgaccctccgcgtccttgagagttctctcaactgcagtgcgggggacatgttgctgctttggggccggctcacctggaggaagatgtgcaggaagctgttggacatgactttcagctccaagaccaacacgctggtggtgaggcagcgctgcgggcggccaggaggtggggtgctgctgcggtatgggagccagcttgctcctgaaaccttctacagagaatgtgacatgcagctctttgggccctggggtgaaatcgtgagcccctcgctgagtccagccacgagtaatgcagggggctgccggctcttcattaatgtggctccgcacgcacggattgccatccatgccctggccaccaacatgggcgctgggaccgagggagccaatgccagctacatcttgatccgggacacccacagcttgaggaccacagcgttccatgggcagcaggtgctctactgggagtcagagagcagccaggctgagatggagttcagcgagggcttcctgaaggctcaggccagcctgcggggccagtactggaccctccaatcatgggtaccggagatgcaggaccctcagtcctggaagggaaaggaaggaacctctagagggcccttcgaacaaaaactcatctcagaagaggatctgaatatgcataccggtcatcatcaccatcaccat

SEQ ID NO: 133 - DNA, 4359 bp, Artificial Sequence
  Nucleotide sequence corresponding to Human ADAMTS13 protein with a single point mutation P1180I
atgcaccagcgtcacccccgggcaagatgccctcccctctgtgtggccggaatccttgcctgtggctttctcctgggctgctggggaccctcccatttccagcagagctgtcttcaggctttggagccacaggccgtgtcttcttacttgagccctggtgctcccttaaaaggccgccctccttcccctggcttccagaggcagaggcagaggcagaggcgggctgcaggcggcatcctacacctggagctgctggtggccgtgggccccgatgtcttccaggctcaccaggaggacacagagcgctatgtgctcaccaacctcaacatcggggcagaactgcttcgggacccgtccctgggggctcagtttcgggtgcacctggtgaagatggtcattctgacagagcctgagggtgctccaaatatcacagccaacctcacctcgtccctgctgagcgtctgtgggtggagccagaccatcaaccctgaggacgacacggatcctggccatgctgacctggtcctctatatcactaggtttgacctggagttgcctgatggtaaccggcaggtgcggggcgtcacccagctgggcggtgcctgctccccaacctggagctgcctcattaccgaggacactggcttcgacctgggagtcaccattgcccatgagattgggcacagcttcggcctggagcacgacggcgcgcccggcagcggctgcggccccagcggacacgtgatggcttcggacggcgccgcgccccgcgccggcctcgcctggtccccctgcagccgccggcagctgctgagcctgctcagcgcaggacgggcgcgctgcgtgtgggacccgccgcggcctcaacccgggtccgcggggcacccgccggatgcgcagcctggcctctactacagcgccaacgagcagtgccgcgtggccttcggccccaaggctgtcgcctgcaccttcgccagggagcacctggatatgtgccaggccctctcctgccacacagacccgctggaccaaagcagctgcagccgcctcctcgttcctctcctggatgggacagaatgtggcgtggagaagtggtgctccaaaggtcgctgccgctccctggtggagctgacccccatagcagcagtgcatgggcgctggtctagctggggtccccgaagtccttgctcccgctcctgcggaggaggtgtggtcaccaggaggcggcagtgcaacaaccccagacctgcctttggggggcgtgcatgtgttggtgctgacctccaggccgagatgtgcaacactcaggcctgcgagaagacccagctggagttcatgtcgcaacagtgcgccaggaccgacggccagccgctgcgctcctcccctggcggcgcctccttctaccactggggtgctgctgtaccacacagccaaggggatgctctgtgcagacacatgtgccgggccattggcgagagcttcatcatgaagcgtggagacagcttcctcgatgggacccggtgtatgccaagtggcccccgggaggacgggaccctgagcctgtgtgtgtcgggcagctgcaggacatttggctgtgatggtaggatggactcccagcaggtatgggacaggtgccaggtgtgtggtggggacaacagcacgtgcagcccacggaagggctctttcacagctggcagagcgagagaatatgtcacgtttctgacagttacccccaacctgaccagtgtctacattgccaaccacaggcctctcttcacacacttggcggtgaggatcggagggcgctatgtcgtggctgggaagatgagcatctcccctaacaccacctacccctccctcctggaggatggtcgtgtcgagtacagagtggccctcaccgaggaccggctgccccgcctggaggagatccgcatctggggacccctccaggaagatgctgacatccaggtttacaggcggtatggcgaggagtatggcaacctcacccgcccagacatcaccttcacctacttccagcctaagccacggcaggcctgggtgtgggccgctgtgcgtgggccctgctcggtgagctgtggggcagggctgcgctgggtaaactacagctgcctggaccaggccaggaaggagttggtggagactgtccagtgccaagggagccagcagccaccagcgtggccagaggcctgcgtgctcgaaccctgccctccctactgggcggtgggagacttcggcccatgcagcgcctcctgtgggggtggcctgcgggagcggccagtgcgctgcgtggaggcccagggcagcctcctgaagacattgcccccagcccggtgcagagcaggggcccagcagccagctgtggcgctggaaacctgcaacccccagccctgccctgccaggtgggaggtgtcagagcccagctcatgcacatcagctggtggagcaggcctggccttggagaacgagacctgtgtgccaggggcagatggcctggaggctccagtgactgaggggcctggctccgtagatgagaagctgcctgcccctgagccctgtgtcgggatgtcatgtcctccaggctggggccatctggatgccacctctgcaggggagaaggctccctccccatggggcagcatcaggacgggggctcaagctgcacacgtgtggacccctgcggcagggtcgtgctccgtctcctgcgggcgaggtctgatggagctccgtttcctgtgcatggactctgccctcagggtgcctgtccaggaagagctgtgtggcctggcaagcaagcctgggagccggcgggaggtctgccaggctgtcccgtgccctgctcggtggcagtacaagctggcggcctgcagcgtgagctgtgggagaggggtcgtgcggaggatcctgtattgtgcccgggcccatggggaggacgatggtgaggagatcctgttggacacccagtgccaggggctgcctcgcccggaaccccaggaggcctgcagcctggagccctgcccacctaggtggaaagtcatgtcccttggcccatgttcggccagctgtggccttggcactgctagacgctcggtggcctgtgtgcagctcgaccaaggccaggacgtggaggtggacgaggcggcctgtgcggcgctggtgcggcccgaggccagtgtcccctgtctcattgccgactgcacctaccgctggcatgttggcacctggatggagtgctctgtttcctgtggggatggcatccagcgccggcgtgacacctgcctcggaccccaggcccaggcgcctgtgccagctgatttctgccagcacttgcccaagccggtgactgtgcgtggctgctgggctgggccctgtgtgggacagggtacgcccagcctggtgccccacgaagaagccgctgctccaggacggaccacagccacccctgctggtgcctccctggagtggtcccaggcccggggcctgctcttctccccggctccccagcctcggcggctcctgattgggccccaggaaaactcagtgcagtccagtgcctgtggcaggcagcaccttgagccaacaggaaccattgacatgcgaggcccagggcaggcagactgtgcagtggccattgggcggcccctcggggaggtggtgaccctccgcgtccttgagagttctctcaactgcagtgcgggggacatgttgctgctttggggccggctcacctggaggaagatgtgcaggaagctgttggacatgactttcagctccaagaccaacacgctggtggtgaggcagcgctgcgggcggccaggaggtggggtgctgctgcggtatgggagccagcttgctcctgaaaccttctacagagaatgtgacatgcagctctttgggccctggggtgaaatcgtgagcccctcgctgagtccagccacgagtaatgcagggggctgccggctcttcattaatgtggctccgcacgcacggattgccatccatgccctggccaccaacatgggcgctgggaccgagggagccaatgccagctacatcttgatccgggacacccacagcttgaggaccacagcgttccatgggcagcaggtgctctactgggagtcagagagcagccaggctgagatggagttcagcgagggcttcctgaaggctcaggccagcctgcggggccagtactggaccctccaatcatgggtaccggagatgcaggaccctcagtcctggaagggaaaggaaggaacctctagagggcccttcgaacaaaaactcatctcagaagaggatctgaatatgcataccggtcatcatcaccatcaccat

SEQ ID NO: 134 - DNA, 4359 bp, Artificial Sequence
  Nucleotide sequence corresponding to Human ADAMTS13 protein with a single point mutation P1182K
atgcaccagcgtcacccccgggcaagatgccctcccctctgtgtggccggaatccttgcctgtggctttctcctgggctgctggggaccctcccatttccagcagagctgtcttcaggctttggagccacaggccgtgtcttcttacttgagccctggtgctcccttaaaaggccgccctccttcccctggcttccagaggcagaggcagaggcagaggcgggctgcaggcggcatcctacacctggagctgctggtggccgtgggccccgatgtcttccaggctcaccaggaggacacagagcgctatgtgctcaccaacctcaacatcggggcagaactgcttcgggacccgtccctgggggctcagtttcgggtgcacctggtgaagatggtcattctgacagagcctgagggtgctccaaatatcacagccaacctcacctcgtccctgctgagcgtctgtgggtggagccagaccatcaaccctgaggacgacacggatcctggccatgctgacctggtcctctatatcactaggtttgacctggagttgcctgatggtaaccggcaggtgcggggcgtcacccagctgggcggtgcctgctccccaacctggagctgcctcattaccgaggacactggcttcgacctgggagtcaccattgcccatgagattgggcacagcttcggcctggagcacgacggcgcgcccggcagcggctgcggccccagcggacacgtgatggcttcggacggcgccgcgccccgcgccggcctcgcctggtccccctgcagccgccggcagctgctgagcctgctcagcgcaggacgggcgcgctgcgtgtgggacccgccgcggcctcaacccgggtccgcggggcacccgccggatgcgcagcctggcctctactacagcgccaacgagcagtgccgcgtggccttcggccccaaggctgtcgcctgcaccttcgccagggagcacctggatatgtgccaggccctctcctgccacacagacccgctggaccaaagcagctgcagccgcctcctcgttcctctcctggatgggacagaatgtggcgtggagaagtggtgctccaaaggtcgctgccgctccctggtggagctgacccccatagcagcagtgcatgggcgctggtctagctggggtccccgaagtccttgctcccgctcctgcggaggaggtgtggtcaccaggaggcggcagtgcaacaaccccagacctgcctttggggggcgtgcatgtgttggtgctgacctccaggccgagatgtgcaacactcaggcctgcgagaagacccagctggagttcatgtcgcaacagtgcgccaggaccgacggccagccgctgcgctcctcccctggcggcgcctccttctaccactggggtgctgctgtaccacacagccaaggggatgctctgtgcagacacatgtgccgggccattggcgagagcttcatcatgaagcgtggagacagcttcctcgatgggacccggtgtatgccaagtggcccccgggaggacgggaccctgagcctgtgtgtgtcgggcagctgcaggacatttggctgtgatggtaggatggactcccagcaggtatgggacaggtgccaggtgtgtggtggggacaacagcacgtgcagcccacggaagggctctttcacagctggcagagcgagagaatatgtcacgtttctgacagttacccccaacctgaccagtgtctacattgccaaccacaggcctctcttcacacacttggcggtgaggatcggagggcgctatgtcgtggctgggaagatgagcatctcccctaacaccacctacccctccctcctggaggatggtcgtgtcgagtacagagtggccctcaccgaggaccggctgccccgcctggaggagatccgcatctggggacccctccaggaagatgctgacatccaggtttacaggcggtatggcgaggagtatggcaacctcacccgcccagacatcaccttcacctacttccagcctaagccacggcaggcctgggtgtgggccgctgtgcgtgggccctgctcggtgagctgtggggcagggctgcgctgggtaaactacagctgcctggaccaggccaggaaggagttggtggagactgtccagtgccaagggagccagcagccaccagcgtggccagaggcctgcgtgctcgaaccctgccctccctactgggcggtgggagacttcggcccatgcagcgcctcctgtgggggtggcctgcgggagcggccagtgcgctgcgtggaggcccagggcagcctcctgaagacattgcccccagcccggtgcagagcaggggcccagcagccagctgtggcgctggaaacctgcaacccccagccctgccctgccaggtgggaggtgtcagagcccagctcatgcacatcagctggtggagcaggcctggccttggagaacgagacctgtgtgccaggggcagatggcctggaggctccagtgactgaggggcctggctccgtagatgagaagctgcctgcccctgagccctgtgtcgggatgtcatgtcctccaggctggggccatctggatgccacctctgcaggggagaaggctccctccccatggggcagcatcaggacgggggctcaagctgcacacgtgtggacccctgcggcagggtcgtgctccgtctcctgcgggcgaggtctgatggagctccgtttcctgtgcatggactctgccctcagggtgcctgtccaggaagagctgtgtggcctggcaagcaagcctgggagccggcgggaggtctgccaggctgtcccgtgccctgctcggtggcagtacaagctggcggcctgcagcgtgagctgtgggagaggggtcgtgcggaggatcctgtattgtgcccgggcccatggggaggacgatggtgaggagatcctgttggacacccagtgccaggggctgcctcgcccggaaccccaggaggcctgcagcctggagccctgcccacctaggtggaaagtcatgtcccttggcccatgttcggccagctgtggccttggcactgctagacgctcggtggcctgtgtgcagctcgaccaaggccaggacgtggaggtggacgaggcggcctgtgcggcgctggtgcggcccgaggccagtgtcccctgtctcattgccgactgcacctaccgctggcatgttggcacctggatggagtgctctgtttcctgtggggatggcatccagcgccggcgtgacacctgcctcggaccccaggcccaggcgcctgtgccagctgatttctgccagcacttgcccaagccggtgactgtgcgtggctgctgggctgggccctgtgtgggacagggtacgcccagcctggtgccccacgaagaagccgctgctccaggacggaccacagccacccctgctggtgcctccctggagtggtcccaggcccggggcctgctcttctccccggctccccagcctcggcggctcctgcccgggaagcaggaaaactcagtgcagtccagtgcctgtggcaggcagcaccttgagccaacaggaaccattgacatgcgaggcccagggcaggcagactgtgcagtggccattgggcggcccctcggggaggtggtgaccctccgcgtccttgagagttctctcaactgcagtgcgggggacatgttgctgctttggggccggctcacctggaggaagatgtgcaggaagctgttggacatgactttcagctccaagaccaacacgctggtggtgaggcagcgctgcgggcggccaggaggtggggtgctgctgcggtatgggagccagcttgctcctgaaaccttctacagagaatgtgacatgcagctctttgggccctggggtgaaatcgtgagcccctcgctgagtccagccacgagtaatgcagggggctgccggctcttcattaatgtggctccgcacgcacggattgccatccatgccctggccaccaacatgggcgctgggaccgagggagccaatgccagctacatcttgatccgggacacccacagcttgaggaccacagcgttccatgggcagcaggtgctctactgggagtcagagagcagccaggctgagatggagttcagcgagggcttcctgaaggctcaggccagcctgcggggccagtactggaccctccaatcatgggtaccggagatgcaggaccctcagtcctggaagggaaaggaaggaacctctagagggcccttcgaacaaaaactcatctcagaagaggatctgaatatgcataccggtcatcatcaccatcaccat

SEQ ID NO: 135 - DNA, 4359 bp, Artificial Sequence
  Nucleotide sequence corresponding to Human ADAMTS13 protein with a single point mutation P1182I
atgcaccagcgtcacccccgggcaagatgccctcccctctgtgtggccggaatccttgcctgtggctttctcctgggctgctggggaccctcccatttccagcagagctgtcttcaggctttggagccacaggccgtgtcttcttacttgagccctggtgctcccttaaaaggccgccctccttcccctggcttccagaggcagaggcagaggcagaggcgggctgcaggcggcatcctacacctggagctgctggtggccgtgggccccgatgtcttccaggctcaccaggaggacacagagcgctatgtgctcaccaacctcaacatcggggcagaactgcttcgggacccgtccctgggggctcagtttcgggtgcacctggtgaagatggtcattctgacagagcctgagggtgctccaaatatcacagccaacctcacctcgtccctgctgagcgtctgtgggtggagccagaccatcaaccctgaggacgacacggatcctggccatgctgacctggtcctctatatcactaggtttgacctggagttgcctgatggtaaccggcaggtgcggggcgtcacccagctgggcggtgcctgctccccaacctggagctgcctcattaccgaggacactggcttcgacctgggagtcaccattgcccatgagattgggcacagcttcggcctggagcacgacggcgcgcccggcagcggctgcggccccagcggacacgtgatggcttcggacggcgccgcgccccgcgccggcctcgcctggtccccctgcagccgccggcagctgctgagcctgctcagcgcaggacgggcgcgctgcgtgtgggacccgccgcggcctcaacccgggtccgcggggcacccgccggatgcgcagcctggcctctactacagcgccaacgagcagtgccgcgtggccttcggccccaaggctgtcgcctgcaccttcgccagggagcacctggatatgtgccaggccctctcctgccacacagacccgctggaccaaagcagctgcagccgcctcctcgttcctctcctggatgggacagaatgtggcgtggagaagtggtgctccaaaggtcgctgccgctccctggtggagctgacccccatagcagcagtgcatgggcgctggtctagctggggtccccgaagtccttgctcccgctcctgcggaggaggtgtggtcaccaggaggcggcagtgcaacaaccccagacctgcctttggggggcgtgcatgtgttggtgctgacctccaggccgagatgtgcaacactcaggcctgcgagaagacccagctggagttcatgtcgcaacagtgcgccaggaccgacggccagccgctgcgctcctcccctggcggcgcctccttctaccactggggtgctgctgtaccacacagccaaggggatgctctgtgcagacacatgtgccgggccattggcgagagcttcatcatgaagcgtggagacagcttcctcgatgggacccggtgtatgccaagtggcccccgggaggacgggaccctgagcctgtgtgtgtcgggcagctgcaggacatttggctgtgatggtaggatggactcccagcaggtatgggacaggtgccaggtgtgtggtggggacaacagcacgtgcagcccacggaagggctctttcacagctggcagagcgagagaatatgtcacgtttctgacagttacccccaacctgaccagtgtctacattgccaaccacaggcctctcttcacacacttggcggtgaggatcggagggcgctatgtcgtggctgggaagatgagcatctcccctaacaccacctacccctccctcctggaggatggtcgtgtcgagtacagagtggccctcaccgaggaccggctgccccgcctggaggagatccgcatctggggacccctccaggaagatgctgacatccaggtttacaggcggtatggcgaggagtatggcaacctcacccgcccagacatcaccttcacctacttccagcctaagccacggcaggcctgggtgtgggccgctgtgcgtgggccctgctcggtgagctgtggggcagggctgcgctgggtaaactacagctgcctggaccaggccaggaaggagttggtggagactgtccagtgccaagggagccagcagccaccagcgtggccagaggcctgcgtgctcgaaccctgccctccctactgggcggtgggagacttcggcccatgcagcgcctcctgtgggggtggcctgcgggagcggccagtgcgctgcgtggaggcccagggcagcctcctgaagacattgcccccagcccggtgcagagcaggggcccagcagccagctgtggcgctggaaacctgcaacccccagccctgccctgccaggtgggaggtgtcagagcccagctcatgcacatcagctggtggagcaggcctggccttggagaacgagacctgtgtgccaggggcagatggcctggaggctccagtgactgaggggcctggctccgtagatgagaagctgcctgcccctgagccctgtgtcgggatgtcatgtcctccaggctggggccatctggatgccacctctgcaggggagaaggctccctccccatggggcagcatcaggacgggggctcaagctgcacacgtgtggacccctgcggcagggtcgtgctccgtctcctgcgggcgaggtctgatggagctccgtttcctgtgcatggactctgccctcagggtgcctgtccaggaagagctgtgtggcctggcaagcaagcctgggagccggcgggaggtctgccaggctgtcccgtgccctgctcggtggcagtacaagctggcggcctgcagcgtgagctgtgggagaggggtcgtgcggaggatcctgtattgtgcccgggcccatggggaggacgatggtgaggagatcctgttggacacccagtgccaggggctgcctcgcccggaaccccaggaggcctgcagcctggagccctgcccacctaggtggaaagtcatgtcccttggcccatgttcggccagctgtggccttggcactgctagacgctcggtggcctgtgtgcagctcgaccaaggccaggacgtggaggtggacgaggcggcctgtgcggcgctggtgcggcccgaggccagtgtcccctgtctcattgccgactgcacctaccgctggcatgttggcacctggatggagtgctctgtttcctgtggggatggcatccagcgccggcgtgacacctgcctcggaccccaggcccaggcgcctgtgccagctgatttctgccagcacttgcccaagccggtgactgtgcgtggctgctgggctgggccctgtgtgggacagggtacgcccagcctggtgccccacgaagaagccgctgctccaggacggaccacagccacccctgctggtgcctccctggagtggtcccaggcccggggcctgctcttctccccggctccccagcctcggcggctcctgcccgggattcaggaaaactcagtgcagtccagtgcctgtggcaggcagcaccttgagccaacaggaaccattgacatgcgaggcccagggcaggcagactgtgcagtggccattgggcggcccctcggggaggtggtgaccctccgcgtccttgagagttctctcaactgcagtgcgggggacatgttgctgctttggggccggctcacctggaggaagatgtgcaggaagctgttggacatgactttcagctccaagaccaacacgctggtggtgaggcagcgctgcgggcggccaggaggtggggtgctgctgcggtatgggagccagcttgctcctgaaaccttctacagagaatgtgacatgcagctctttgggccctggggtgaaatcgtgagcccctcgctgagtccagccacgagtaatgcagggggctgccggctcttcattaatgtggctccgcacgcacggattgccatccatgccctggccaccaacatgggcgctgggaccgagggagccaatgccagctacatcttgatccgggacacccacagcttgaggaccacagcgttccatgggcagcaggtgctctactgggagtcagagagcagccaggctgagatggagttcagcgagggcttcctgaaggctcaggccagcctgcggggccagtactggaccctccaatcatgggtaccggagatgcaggaccctcagtcctggaagggaaaggaaggaacctctagagggcccttcgaacaaaaactcatctcagaagaggatctgaatatgcataccggtcatcatcaccatcaccat

SEQ ID NO: 136 - protein, 39 aa, Artificial Sequence
  Linker 3 subregion of Human ADAMTS13 protein with a single point mutation A1144K
KAAPGRTTATPAGASLEWSQARGLLFSPAPQPRRLLPGP

SEQ ID NO: 137 - protein, 39 aa, Artificial Sequence
  Linker 3 subregion of Human ADAMTS13 protein with a single point mutation A1145K
AKAPGRTTATPAGASLEWSQARGLLFSPAPQPRRLLPGP

SEQ ID NO: 138 - protein, 39 aa, Artificial Sequence
  Linker 3 subregion of Human ADAMTS13 protein with a single point mutation A1146K
AAKPGRTTATPAGASLEWSQARGLLFSPAPQPRRLLPGP

SEQ ID NO: 139 - protein, 39 aa, Artificial Sequence
  Linker 3 subregion of Human ADAMTS13 protein with a single point mutation P1147K
AAAKGRTTATPAGASLEWSQARGLLFSPAPQPRRLLPGP

SEQ ID NO: 140 - protein, 39 aa, Artificial Sequence
  Linker 3 subregion of Human ADAMTS13 protein with a single point mutation P1154K
AAAPGRTTATKAGASLEWSQARGLLFSPAPQPRRLLPGP

SEQ ID NO: 141 - protein, 39 aa, Artificial Sequence
  Linker 3 subregion of Human ADAMTS13 protein with a single point mutation P1171K
AAAPGRTTATPAGASLEWSQARGLLFSKAPQPRRLLPGP

SEQ ID NO: 142 - protein, 39 aa, Artificial Sequence
  Linker 3 subregion of Human ADAMTS13 protein with a single point mutation P1173K
AAAPGRTTATPAGASLEWSQARGLLFSPAKQPRRLLPGP

SEQ ID NO: 143 - protein, 39 aa, Artificial Sequence
  Linker 3 subregion of Human ADAMTS13 protein with a single point mutation P1175K
AAAPGRTTATPAGASLEWSQARGLLFSPAPQKRRLLPGP

SEQ ID NO: 144 - protein, 39 aa, Artificial Sequence
  Linker 3 subregion of Human ADAMTS13 protein with a single point mutation P1180K
AAAPGRTTATPAGASLEWSQARGLLFSPAPQPRRLLKGP

SEQ ID NO: 145 - protein, 39 aa, Artificial Sequence
  Linker 3 subregion of Human ADAMTS13 protein with a single point mutation P1182K
AAAPGRTTATPAGASLEWSQARGLLFSPAPQPRRLLPGK

SEQ ID NO: 146 - protein, 39 aa, Artificial Sequence
  Linker 3 subregion of Human ADAMTS13 protein with a single point mutation A1144I
IAAPGRTTATPAGASLEWSQARGLLFSPAPQPRRLLPGP

SEQ ID NO: 147 - protein, 39 aa, Artificial Sequence
  Linker 3 subregion of Human ADAMTS13 protein with a single point mutation A1145I
AIAPGRTTATPAGASLEWSQARGLLFSPAPQPRRLLPGP

SEQ ID NO: 148 - protein, 39 aa, Artificial Sequence
  Linker 3 subregion of Human ADAMTS13 protein with a single point mutation A1146I
AAIPGRTTATPAGASLEWSQARGLLFSPAPQPRRLLPGP

SEQ ID NO: 149 - protein, 39 aa, Artificial Sequence
  Linker 3 subregion of Human ADAMTS13 protein with a single point mutation P1147I
AAAIGRTTATPAGASLEWSQARGLLFSPAPQPRRLLPGP

SEQ ID NO: 150 - protein, 39 aa, Artificial Sequence
  Linker 3 subregion of Human ADAMTS13 protein with a single point mutation P1154I
AAAPGRTTATIAGASLEWSQARGLLFSPAPQPRRLLPGP

SEQ ID NO: 151 - protein, 39 aa, Artificial Sequence
  Linker 3 subregion of Human ADAMTS13 protein with a single point mutation P1171I
AAAPGRTTATPAGASLEWSQARGLLFSIAPQPRRLLPGP

SEQ ID NO: 152 - protein, 39 aa, Artificial Sequence
  Linker 3 subregion of Human ADAMTS13 protein with a single point mutation P1173I
AAAPGRTTATPAGASLEWSQARGLLFSPAIQPRRLLPGP

SEQ ID NO: 153 - protein, 39 aa, Artificial Sequence
  Linker 3 subregion of Human ADAMTS13 protein with a single point mutation P1175I
AAAPGRTTATPAGASLEWSQARGLLFSPAPQIRRLLPGP

SEQ ID NO: 154 - protein, 39 aa, Artificial Sequence
  Linker 3 subregion of Human ADAMTS13 protein with a single point mutation P1180I
AAAPGRTTATPAGASLEWSQARGLLFSPAPQPRRLLIGP

SEQ ID NO: 155 - protein, 39 aa, Artificial Sequence
  Linker 3 subregion of Human ADAMTS13 protein with a single point mutation P1182I
AAAPGRTTATPAGASLEWSQARGLLFSPAPQPRRLLPGI

SEQ ID NO: 156 - protein, 39 aa, Artificial Sequence; identical to SEQ ID NO: 50
  Linker 3 subregion of Human ADAMTS13 protein concensus sequence
  SITE (1)..(1): wherein Xaa = A, K, I, or V
  SITE (2)..(2): wherein Xaa = A, K, I, or V
  SITE (3)..(3): Wherein Xaa = A, K, I, or V
  SITE (4)..(4): Wherein Xaa = P, K, I, or V
  SITE (11)..(11): Wherein Xaa = P, K, I, or V
  SITE (28)..(28): Wherein Xaa = P, K, I, or V
  SITE (30)..(30): Wherein Xaa = P, K, I, or V
  SITE (32)..(32): Wherein Xaa = P, K, I, or V
  SITE (37)..(37): Wherein Xaa = P, K, I, or V
  SITE (39)..(39): Wherein Xaa = P, K, I, or V

1. An ADAMTS13 variant having an amino acid sequence comprising one or more amino acid substitutions in the region corresponding to SEQ ID NO:48 relative to the amino acid sequence of wildtype human ADAMTS13.

2. The ADAMTS13 variant according to claim 1, wherein the ADAMTS13 variant comprises substitution at one or more of the following positions relative to the amino acid sequence of wildtype human ADAMTS13: A1144, A1145, A1146, P1147, P1154, P1171, P1173,P1175,P1180, and P1182.

3. The ADAMTS13 variant according to claim 1, wherein the ADAMTS13 variant comprises an amino acid sequence according to SEQ ID NO:50 or 156.

4. The ADAMTS13 variant according to claim 1, wherein the ADAMTS13 variant comprises substitution to valine, isoleucine, or lysine at one or more of the following positions relative to the amino acid sequence of wildtype human ADAMTS13: A1144, A1145, A1146, P1147, P1154, P1171, P1173, P1175, P1180, and P1182.

5. The ADAMTS13 variant according to claim 1, wherein the ADAMTS13 variant comprises:
(i) the amino acid sequence of SEQ ID NO:51, 52, 53, 54, 55, 56, 57, 58, 59, or 60; or
(ii) the amino acid sequence of SEQ ID NO:136, 137, 138, 139, 140, 141, 142, 143, 144, or 145; or
(iii) the amino acid sequence of SEQ ID NO:146, 147, 148, 149, 150, 151, 152, 153, 154, or 155.

6. The ADAMTS13 variant according to claim 1, wherein the ADAMTS13 variant comprises substitution to valine, isoleucine, or lysine at one or both of positions P1180 and/or P1182 relative to the amino acid sequence of wildtype human ADAMTS13.

7. The ADAMTS13 variant according to claim 1, wherein the ADAMTS13 variant comprises the amino acid sequence of SEQ ID NO:59, 60, 144, 145, 154, or 155.

8. The ADAMTS13 variant according to claim 1, wherein the ADAMTS13 variant comprises or consists of: (i) an amino acid sequence having at least 60% sequence identity to the amino acid sequence of SEQ ID NO:61; or (ii) an amino acid sequence having at least 60% sequence identity to the amino acid sequence of SEQ ID NO:62; or (iii) an amino acid sequence having at least 60% sequence identity to the amino acid sequence of SEQ ID NO:63; or (iv) an amino acid sequence having at least 60% sequence identity to the amino acid sequence of SEQ ID NO:64; or (v) an amino acid sequence having at least 60% sequence identity to the amino acid sequence of SEQ ID NO:65; or (vi) an amino acid sequence having at least 60% sequence identity to the amino acid sequence of SEQ ID NO:66; or (vii) an amino acid sequence having at least 60% sequence identity to the amino acid sequence of SEQ ID NO:67; or (viii) an amino acid sequence having at least 60% sequence identity to the amino acid sequence of SEQ ID NO:68; or (ix) an amino acid sequence having at least 60% sequence identity to the amino acid sequence of SEQ ID NO:69; or (x) an amino acid sequence having at least 60% sequence identity to the amino acid sequence of SEQ ID NO:70.

9. The ADAMTS13 variant according to claim 1, wherein the ADAMTS13 variant displays increased proteolytic activity as compared to wildtype human ADAMTS13.

10. A nucleic acid encoding an ADAMTS13 variant according to claim 1.

11. An expression vector, comprising a nucleic acid according to claim 10.

12. A cell comprising an ADAMTS13 variant according to claim 1.

13. A method for producing an ADAMTS13 variant, comprising culturing a cell comprising a nucleic acid according to claim 10 under conditions suitable for expression of an ADAMTS13 variant by the cell.

14. A pharmaceutical composition comprising an ADAMTS13 variant according to claim 1 and a pharmaceutically acceptable carrier, diluent, excipient or adjuvant.

15. (canceled)

16. (canceled)

17. (canceled)

18. A method of treating or preventing a disease or condition characterised by one or more of: an increased level and/or activity of VWF, or of a complex comprising VWF; a reduced level of ADAMTS13; a reduced level of ADAMTS13 proteolytic activity; thrombosis; and inflammation, comprising administering to a subject a therapeutically or prophylactically effective amount of an ADAMTS13 variant according to claim 1.

19. The composition according to claim 18, wherein the disease or condition is selected from: a disease/condition characterised by thrombosis, a disease/condition characterised by inflammation, thrombotic thrombocytopenic purpura (TTP), ischaemic stroke, haemorrhagic stroke, subarachnoid haemorrhage (SAH), intracerebral haemorrhage (ICH), chronic thromboembolic pulmonary hypotension (CTEPH), myocardial infarction (MI), ST-elevation myocardial infarction (STEMI), unstable angina (UA), ischemia, reperfusion, deep venous thrombosis, pulmonary embolism, intravascular coagulation (DIC), hemolytic-uremic syndrome (HUS), cerebral infarction, systemic lupus erythematosus (SLE), disease cause by infection with a SARSr-CoV (e.g. SARS-CoV-2; e.g. COVID-19), acute respiratory distress syndrome (ARDS), pneumonia, kidney damage, nephropathy, microvascular diseases, dementia, Crohn's disease, inflammatory bowel disease, ulcerative colitis, and bacterial diarrhoea.

20. A method of cleaving VWF, comprising contacting VWF or a complex comprising VWF with an ADAMTS13 variant according to claim 1.
